(19) United States
(12) Patent Application Publication
(10) Pub. No.: US 2015/0183847 A1
(43) Pub. Date: Jul. 2, 2015

(54) PROTEIN AND PROTEIN CONJUGATE FOR DIABETES TREATMENT, AND APPLICATIONS THEREOF

(71) Applicant: ADDA Biotech Inc., Beijing (CN)

(72) Inventor: Shulin Qin, Beijing (CN)

(73) Assignee: ADDA BIOTECH INC., Beijing (CN)

(21) Appl. No.: 14/402,074

(22) PCT Filed: May 17, 2013
(86) PCT No.: PCT/CN2013/000587

§ 371 Date: Nov. 18, 2014

(30) Foreign Application Priority Data
May 18, 2012 (CN) 201210157196.6

(51) Int. Cl. C07K 14/545; C07K 14/645; C07K 14/62; C07K 14/575

(52) U.S. Cl. CPC C07K 14/545; C07K 14/575; C07K 14/645; C07K 14/62; C07K 2319/74

(57) ABSTRACT

The present invention relates to the field of biopharmaceutics, and in particular to a protein, a protein conjugate, a pharmaceutical composition and its use for treating diabetes. The fusion protein of the present invention is obtained by linking two polypeptides, wherein one polypeptide is an interleukin-1 receptor antagonistic protein or an analogue thereof, and another polypeptide is GLP-1 receptor binding polypeptide or an analogue thereof, or an insulin receptor binding polypeptide or an analogue thereof, or a GIP receptor binding polypeptide or an analogue thereof. The fusion proteins of the present invention and conjugates thereof have a significant efficacy in treating diabetes, and can be used in a lower dose, resulting in a marked reduction in side effects.

### TECHNICAL FIELD

[0001] The invention belongs to the field of biopharmaceutics, and relates to a protein, a protein conjugate and the use thereof for treating diabetes.

### BACKGROUND ART

[0002] Cytokines are biologically active macromolecules present in or released from cells. Most of them are polypeptide-like species, such as interleukins, interferons, colony-stimulating factor (CSF), and tumor necrosis factor (TNF). They are not expressed or expressed in a low amount in normal body, but are transcribed and translated in abnormal states (disease or infection). Cytokines regulate or modulate cellular responses in inflammatory or immune responses. They activate biological responses by binding to the specific receptors on the surfaces of the sensitive cells. Since cytokines often have their receptors on various target cells, pleiotropic effects of the responses are common features for a cytokine. A second messenger can also be generated through other cytokines or cytokine receptors.

[0003] For a highly active cytokine, there must be a mechanism by which its release is controlled and its activities are constrained. The biosynthesis and release of a cytokine can be regulated strictly by other cytokines or exogenous factors. Two mechanisms for controlling the activities of a cytokine have been found: the first is a receptor antagonist (inhibitory protein type I) which has a structure homologous to that of the cytokine and can bind to the receptor molecule, but does not trigger signal transduction, thus exerting inhibition by competing with the cytokine; the second is a soluble receptor molecule (inhibitory protein type II) which competes with the cellular receptor for cytokine binding, thus exerting inhibition. A large amount of experiments have shown that the two suppressive responses have a physiological correlation. At present, it has been believed that inhibitor type II has a neutralizing effect similar to that of a buffer solution, which in turn limits the systemic effect of a cytokine. Meanwhile, it also allows the cytokine to rise locally to a high concentration, thereby enhancing a paracrine effect. Their recombinant forms have pharmacological activities.

[0004] Interleukin 1 (IL-1) is involved in a wide variety of physiological processes. By inducing secretion of the neutral proteases and other cytokines (tumor necrosis factor TNF), IL-1 stimulates proliferation of various hematopoietic cells and other cells, regulates pro-inflammatory responses, and mediates damage to tissues in an inflammation, including stimulating proliferation of the synoviocytes and the chondrocytes and production of PGE2, collagenase, phospholipase A, etc, inducing inflammation in a joint; facilitates release of neutrophils from the bone marrow, induces chemotaxis and infiltration of mononuclear cells and the multinucleated granulocytes into an inflammatory site, releases lysosomal enzymes locally, causes de-granulation of the basophils and the mast cells, releases inflammatory mediators, etc. IL-1 can impose damage directly on β cells which produce insulin in the pancreatic islet. The diseases associated with IL-1 comprise rheumatoid arthritis, diabetes mellitus, systemic lupus erythematosus, dermatosclerosis and other immune diseases.

[0005] IL-1 includes two relevant factors: IL-la and IL-1β. Furthermore, there is a relevant polypeptide known as IL-1 receptor antagonist (IL-1Ra). Both IL-la and IL-1β exert their biological activities by binding to IL-1 receptor (IL-1R) on the cellular surface and signaling into the interior of a cell via a signal transduction system. Two types of IL-1R have been found: type I receptor (IL-1RI) and type II receptor (IL-1R II). The type I receptor, also known as T-cell receptor, has a signal transduction function; whereas the type II receptor, also known as B-cell receptor, can bind to IL-1, but does not transduce the signal. In fact, IL-1RII acts as an attenuator of IL-1, which can be designated as a “trapping” receptor. When IL-1 binds to IL-1R I, a complex is formed and then binds to a IL-1R accessory protein (IL-1R AcP) with a high affinity. The IL-1 signal transduction is activated probably by a heterodimer formed by association of the intracellular portion of the IL-1R I with the IL-1R-AcP. Furthermore, the extracellular portions of the IL-1R are also known as the soluble receptors, that is, type I soluble receptor (sIL-1RI) and type II soluble receptor (sIL-1RII), which exist in the circulation system of the body both in the normal state and in the diseased cases and can bind to IL-1α, IL-1β, or IL-1Ra to act as a natural “buffer”.

[0006] Arend, et al. (“Interleukin 1 receptor antagonist: A new member of the interleukin 1 family.” J Clin Invest, 1991, 88(5): 1445-1451) has found a substance present in the cell culture supernatant and the body fluid and having an activity of inhibiting IL-1 and designated it as IL-1Ra. Eisenberg, et al. (“Interleukin 1 receptor antagonist is a member of the interleukin 1 gene family: evolution of a cytokine control mechanism.” PNAS, 1991, 88(12): 5 232-5236) has found by molecular clone technology that the gene for IL-1Ra is 1.8 kb in length, having an open reading frame encoding 177 of amino acids; and the mature form of the IL-1Ra protein has 152 of amino acids and also has a leader sequence of 25 amino acids in length. IL-1Ra has 26%-30% homology with IL-1β, and 19% with IL-1α, with a gene structure similar to that of IL-1. Therefore, it can be postulated that the portion in which the IL-1Ra shares structural similarity with the IL-1 performs a receptor-binding function, but does not activate signal transduction across the membrane. In a pathologic state, macrophages in many tissues such as synovium and dermal tissues can produce IL-1Ra. Both the human's normal skin and the cultured keratinocytes and monocytes express IL-1Ra mRNA. Although IL-1Ra has no agonism in itself upon binding to IL-1 receptor, it can eliminate or alleviate the biological effects of the IL-1, thereby affecting pathophysiological processes in the body. The equilibrium between IL-1 and IL-1Ra determines the role of IL-1 in an inflammatory process.

[0007] Many experiments have demonstrated that IL-1Ra exerts various effects, such as suppressing generation of prostaglandins, inducing a NO concentration in the serum, reducing the amount of the expressed cyclooxygenase-2 and collagenase-1, preventing the leucocytes from infiltration and the proteoglycans in joint cartilage from degradation, antagonizing an effect of IL-1β that promote the expression of the nerve growth factor, etc., which implies a wide prospect for the use of IL-1Ra in treating inflammatory diseases such as rheumatoid arthritis, amyloidosis, osteoarthritis, allergic encephalomyelitis, etc. IL-1Ra can also improve nephritis, dermatitis and respiratory inflammation, decrease the mortality of the septic shock, increase survival rate of the heat shock, suppress growth of the myeloma, and increase the success rate of the corneal homotransplantation. Likely, some agents which can induce expression of the IL-1Ra, including the human blood serum IgA, corticosteroids, non-steroid anti-inflammatory drugs such as mofezolac, IL-4, IL-1β, IFN, TGF-β, IL-6, and other cytokines performing signal transduction through gp130, are useful in treating diseases caused by IL-1.

[0008] The trade name of IL-1Ra is Kineret. Kineret (generic name: Anakinra), which has been developed by Amgen, USA, is a non-glycosylated recombinant human IL-1Ra (rhIL-1Ra) having a molecular weight of 17.3 KD and consisting of 153 amino acids. The major difference between Kineret and the endogenous human IL-1Ra is that the former has one methionine residue at its N-terminus. On Nov. 14, 2001, Kineret was approved by FDA for marketing to treat adults with moderately to severely active rheumatoid arthritis who have had an absence of clinical improvement of symptoms in therapy with one or more disease-modifying anti-rheumatic drugs (DMARDs), so as to alleviate their symptoms. European Medicines Agency (EMA) has approved Kineret on Nov. 21, 2001 to be used in combination with methotrexate in patients who are not responsive adequately to treatment with methotrexate alone. At present, Kineret is under clinical trials for inflammatory bowel disease (IBD), asthma, and transplant rejection.

[0009] The onset of diabetes is associated with the impaired function of pancreatic islet β cells, and the function of pancreatic islet β cells will deteriorate progressively as pathological state extends. Currently it had been discovered that, in type 1 diabetes resulting from the destruction and the impaired functions of β cells caused by inflammation of pancreatic islet β cells, the pro-inflammatory factor IL-1β plays a key role in suppressing the functions of pancreatic islet β cells and facilitating apoptosis thereof. In patients with type 2 diabetes, it has been observed also that the expression of IL-1 in the pancreatic islet β cells is enhanced while the expression of IL-1Ra is reduced. Insufficiency of IL-1Ra appears to be a genetic property, since the genetic polymorphisms of the gene encoding IL-1Ra and the altered content of the serum IL-1Ra are correlated. IL-1β can improve the expression of the inflammatory cytokines in pancreatic islet, increase infiltration of the immune cells, leading to inflammation in the tissue, and affect the functions of β cells and the insulin sensitivity. In in vitro studies, the long-term exposure to high concentrations of glucose and a peptide hormone leptin secreted by adipose tissues would induce β cells and the pancreatic islet to produce and release IL-1β, which in turn causes the impaired functions and apoptosis of the β cells. Exogenous addition of an IL-1 receptor antagonist, such as IL-1Ra, can protect the β cells from the damage caused by high concentrations of glucose and leptin, and reduce the inflammatory marker of patients with type 2 diabetes. Similar studies also demonstrated that inflammatory mediator generated within the pancreatic islet is closely-related to diabetes (Boni-Schnetzler, et al, “Increased Interleukin (IL)-1β Messenger Ribonucleic Acid Expression in β-Cells of Individuals with Type 2 Diabetes and Regulation of IL-1β in Human Islets by Glucose and Autostimulation.” J Clin Endocrinol Metab, 2008, 93(10): 4065-4074; Donath, et al, “Islet Inflammation Impairs the Pancreatic β-Cell in Type 2 Diabetes.” Physiology (Bethesda) 2009, 24:325-331).

[0010] In one study (Ehses et al, “IL-1 antagonism reduces hyperglycemia and tissue inflammation in the type 2 diabetic GK rat”, PNAS, 2009, 106(33): 13998-14003), researchers had investigated intensively the effects of IL-1 on generation of inflammatory cytokines in pancreatic islet and inflammation in peripheral tissues responsive to insulin. GK rats, which are spontaneous, nonobese model of type 2 diabetes and develop inflammation in the pancreatic islet and the insulin resistance in peripheral tissues (liver, skeletal muscles, and adipose tissues), were chose by the researchers as the object of study. It had been found that IL-1β is expressed highly in the pancreatic islet and hepatic tissues of GK rats and that in vitro administration of IL-1Ra to the rats can block specifically the activity of IL-1 and reduce the release of inflammatory cytokines from the pancreatic islet. It was also shown in in vivo experiments that IL-1Ra can improve hyperglycemia, the function of β cells and the insulin resistance in GK rats. In addition, IL-1Ra can reduce the levels of the pancreatic islet-derived pro-inflammatory cytokines, such as, IL-1β, IL-6, TNF α, KC, MCP-1, and MIP-1α and infiltration of CD68(+), MHC II(+), and CD53(+) immune cells into the pancreatic islet. Expression of the cytokines in hepatic tissues is also reduced. Therefore, it was concluded that IL-1Ra could improve the function of β cells and may be used in treatment of type 2 diabetes.

[0011] Marc Y. Donath et al from the University of Zurich, Switzerland, conducted a double-blind clinical trial with anakinra, and it was discovered from the results that blockage of IL-1 can improve patient's hyperglycemia and functions of pancreatic islet β cells, and lower inflammatory markers in the blood. Furthermore, Marc Y. Donath et al also performed another double-blind clinical trail with an anti-IL-1 antibody XOMA 052 to evaluate its safety and pharmacokinetics. Patients in the trail showed excellent tolerance and no severe drug-related adverse reactions were reported.

[0012] In one study, 70 patients suffering from type 2 diabetes with A₁C>7.5% and BMI>27 kg/m² were randomly assigned to undergo treatment with anakinra or placebo for 13 weeks. Thirty-nine weeks after anakinra withdrawal, it had been shown that blockage of IL-1 with anakinra can lead to improvement of the proinsulin-to-insulin (PI/I) ratio and systemic inflammatory markers compared with values in placebo-treated patients, and the improvement can last 39 weeks after treatment withdrawal (Larsen et al, “Sustained Effects of Interleukin-1 Receptor Antagonist Treatment in Type 2 Diabetes”, Diabetes Care 2009, 32: 1663-1668).

[0013] Collectively, the inflammatory cytokines are one of important causes for onset of diabetes. In addition to the conventional treatments currently used, the anti-inflammatory treatment is likely to be a novel approach of diabetic treatment.

[0014] Since IL-1 in a trace amount can exert a full biological effect, the biological effect of IL-1 can be efficaciously suppressed when the concentration of IL-1ra is usually more than 100-folds higher than that of IL-1. During the course of treating rheumatoid arthritis, the dosage of anakinra is up to 100-150 mg/d, which imposes a very high requirement on the downstream processing and manufacturing in biopharmaceuticals and is a challenge to the biopharmaceutical corporations. In theory, IL-1Ra can act on IL-1 receptors at any sites in the body with no selectivity. And it is a question whether administration of a large dosage for a long time would lead to increased infection in the patients due to immunosuppression. In particular the patients with diabetes are susceptible to infection and uneasy to be cured. Frequent dosing adds the burdens on the body, mind and economy of patients. Furthermore, IL-1Ra has an in vivo half-time of only 4-6 hours, which curtails the efficacy and increases the dosage. Consequently, the trend of new drug development is to design a novel, targeted IL-1ra, improve the efficacy in diabetic treatment, reduce unnecessary immunosuppression, reduce the dosage, and extend the in vivo time of action.

### SUMMARY OF THE INVENTION

[0015] An object of the invention is to provide a novel therapeutic medicament for diabetes, the medicament comprises a fusion protein or a conjugate thereof.

[0016] In one aspect, the present invention provides a fusion protein consisting of two polypeptides which are linked together, wherein one polypeptide is an interleukin-1 receptor antagonistic protein or analogues thereof and the other polypeptide is a GLP-1 receptor binding polypeptide or analogues thereof, or a GIP receptor binding polypeptide or analogues thereof, or an insulin receptor binding polypeptide or analogues thereof.

[0017] The structure of said fusion protein is as follows: the interleukin-1 receptor antagonistic protein or an analogue thereof -Lⱼ- the other polypeptide, or the other polypeptide -L- the interleukin-1 receptor antagonistic protein or an analogue thereof.

[0018] The sequence of said interleukin-1 receptor antagonistic protein or an analogue thereof is

(SEQ ID NO: 204)
X_{IL0}RPSGRKSSKMQAFRIWDVNQKTFYLRNNQLVAGYLQGPNVNLEEKI
DVVPIEPHALFLGIHGGKMX_{IL66}LSX_{IL69}VKSGDETRLQLEAVX_{IL84}
ITDLSENRKQDKRFAFIRSDSGPTTSFESAAX_{IL116}PGWFLX_{IL122}TA
MEADQPVSLTNMPDEGVMVTKEYFQEDE,

wherein

[0019] X_{IL0} is a methionine, cysteine, general formula 1, general formula 2 or absent;

[0020] X_{IL66}, X_{IL69}, X_{IL116}, or X_{IL122} is a cysteine or serine; X_{IL84} is a cysteine or asparagine;

[0021] Lⱼ is a linking group or spacer group, including a long chain fatty acid, polyethylene glycol, an amino acid, a short peptide, a protein, or a long chain formed by linking one or more of the optional long chain fatty acids, polyethylene glycol, amino acids, short peptides, etc through a covalent bond, or any of the structures connecting two proteins/polypeptides through a covalent bond, or absent; preferably, said linking group or spacer group comprises one or more lysines or cysteines of which the amino or mercapto groups on the side chains are available for reacting with a modifying group; preferably, the general formula of said short peptide is a

(SEQ ID NO: 436)
(GlyGlyGlyGlySer)ₙ,

wherein n is a 0, 1, 2, 3, 4, 5, or 6.

[0022] In one aspect, the present invention provides a protein conjugate which is a compound obtained through modifications such as acylation, grafting and the like on the basis of the fusion protein of the present invention.

[0023] In one aspect, the present invention provides a pharmaceutical composition comprising the fusion protein or the protein conjugate of the present invention and pharmaceutically acceptable carriers or additives.

[0024] In one aspect, the present invention provides the use of the fusion protein, the protein conjugate, or the pharmaceutical composition in treating diabetes.

[0025] In one aspect, the present invention provides the use of the fusion protein and the protein conjugate in preparing a medicament for treating diabetes.

[0026] In one aspect, the present invention provides a method of treating diabetes, the method comprising administering to a patient in need the fusion protein, the protein conjugate, or the pharmaceutical composition of the present invention.

[0027] The fusion protein and a derivative thereof has a significant efficacy in treating diabetes, and can be used at a lower dose, resulting in a marked reduction in side effects.

### BRIEF DESCRIPTION OF THE DRAWINGS

[0028] FIG. 1A and FIG. 1B are the structures of expression vectors for the native interleukin-1 receptor antagonistic protein (IL-1Ra) (IL-1ra-40-SUMO in the figure) and the G-20 (IL-1ra-SUMO in the figure) respectively.

[0029] FIG. 2 shows the DNA sequencing results of the native interleukin-1 receptor antagonistic protein (IL-1Ra) (IL-1ra-40 in the figure) and the G-20 (IL-1ra in the figure).

[0030] FIG. 3A-3C are the electrophoregrams of the fusion protein G-20 having the SUMO tag preliminarily purified by affinity chromatography.

[0031] FIG. 3A: a protein molecular weight marker is in the first lane, representing 9 K, 14 K, 22 K, 30 K, and 41 K respectively from the bottom; the cell lysate is in the second lane; the washing buffer through the column is in the third lane; the elution buffer through the column is in the fourth lane.

[0032] FIG. 3B: the fusion protein G-20 having the SUMO tag purified twice is in the first and second lanes, respectively; a protein molecular weight marker is in the third lane.

[0033] FIG. 3C: a protein molecular weight marker is in the first lane, a fusion protein G-20 having the SUMO tag removed is in the second lane.

[0034] FIG. 4 is the purity of the G-20 samples analyzed with RP-HPLC at a special buffer gradient.

[0035] FIG. 5 is the mass spectrum for the fusion protein G-20.

[0036] FIGS. 6A and 6B are the peptide mass fingerprinting for the native interleukin-1 receptor antagonist prepared by the method for protein expression in the present invention, the protein is used as a control in the animal test.

[0037] FIG. 7 is the analysis of the blood glucose in an animal test. Four groups of mice were treated with saline, the interleukin-1 receptor antagonist, the fusion proteins G-2 and G-20 (two representative fusion proteins of the GLP-1 receptor binding polypeptide—linking group—the interleukin-1 receptor antagonistic protein) respectively for 12 weeks, and then examined for the change of blood glucose in a glucose tolerance test.

[0038] FIG. 8 is the analysis of insulin level in an animal test. Four groups of mice were treated with saline (1 in the figure), the interleukin-1 receptor antagonist (2 in the figure), G-20 (3 in the figure) and G-2 (4 in the figure) (two representative fusion proteins of the GLP-1 receptor binding polypeptide—linking group—the interleukin-1 receptor antagonistic protein) for 12 weeks, and then examined for the change of insulin level in a glucose tolerance test.

[0039] FIG. 9 is the analysis of the blood glucose in an animal test. Four groups of mice were treated with saline, the interleukin-1 receptor antagonist, the fusion proteins IN-7 and IN-62 (two representative fusion proteins of the insulin receptor binding polypeptide—linking group—the interleukin-1 receptor antagonistic protein) for 12 weeks, and then examined for the change of blood glucose in an insulin tolerance test.

[0040] FIG. 10 is the analysis of blood glucose in an animal test. Four groups of mice were treated with saline, the interleukin-1 receptor antagonist, the fusion proteins GI-3 and GI-7 (two representative fusion proteins of the GIP receptor binding polypeptide—linking group—the interleukin-1 receptor antagonistic protein) for 12 weeks, and then examined for the change of blood glucose in a glucose tolerance test.

### MODE OF CARRYING OUT THE INVENTION

### Definition and Terms

[0041] The following definitions will apply throughout the invention unless otherwise indicated. Terms not defined herein have the meaning commonly understood in the art to which the term pertains.

[0042] In this application, a hIL-1Ra or IL-1Ra denotes the mature form of a human interleukin-1 receptor antagonist, while a IL-1ra refers to its analogues, including the interleukin-1 receptor antagonists and conjugates thereof provided in the present invention.

[0043] An “amino acid” encompasses any molecule containing both amino and carboxyl functional groups, wherein the amino and carboxyl groups are attached to the same carbon atom (the alpha carbon) in alpha-amino acid. The alpha carbon may have one or two organic substituents. An amino acid encompasses the L and D isomers and a racemic mixture. Unless otherwise specified, the amino acid residues in the sequence of the polypeptide of the present invention are all L isomers, that is, L-amino acids. And a D-amino acid is indicated by prefixing the designation of the amino acid or its abbreviation with the letter “d”, e.g., dK.

[0044] The expression “an encodable amino acid” or “an encodable amino acid residue” is used to indicate an amino acid or amino acid residue which could be encoded by a triplet (“codon”) of nucleotides, wherein

[0045] hGlu is homoglutamic acid.

[0046] α-hGlu is the L isomer of —HNCH(CO—)CH₂CH₂CH₂COOH.

[0047] δ-hGlu is the L isomer of —HNCH(COOH)CH₂CH₂CH₂CO—.

[0048] α-Asp is the L isomer of —HNCH(CO—)CH₂COOH.

[0049] β-Asp is the L isomer of —HNCH(COOH)CH₂CO—.

[0050] α-Glu is the L isomer of —HNCH(CO—)CH₂CH₂COOH.

[0051] γ-Glu is the L isomer of —HNCH(COOH)CH₂CH₂CO—.

[0052] β-Ala is —NH—CH₂—CH₂—COOH.

[0053] Sar is sarcosine.

[0054] An amino acid residue can be described with single-letter abbreviation or three-letter abbreviation.

TABLE 1
Amino Acids and abbreviations

| | Three-letter | Single-letter | | Three-letter | Single-letter |
|---|---|---|---|---|---|
| Amino acid | abbreviation | abbreviation | Amino acid | abbreviation | abbreviation |
| Glycine | Gly | G | Threonine | Thr | T |
| Alanine | Ala | A | Cysteine | Cys | C |
| Valine | Val | V | Methionine | Met | M |
| Leucine | Leu | L | Asparagine | Asn | N |
| Isoleucine | Ile | I | Glutamine | Gln | Q |
| Proline | Pro | P | Tryptophan | Trp | W |
| Phenylalanine | Phe | F | Serine | Ser | S |
| Tyrosine | Tyr | Y | Lysine | Lys | K |
| Aspartic acid | Asp | D | Arginine | Arg | R |
| Glutamic acid | Glu | E | Histidine | His | H |

[0055] Context Related to Insulin:

[0056] “Native insulin” means mammalian insulin (e.g., human insulin, bovine insulin, porcine insulin etc.) from natural, synthetic, or genetically engineered sources. Human insulin comprises an A-chain of 21 amino acids and a B-chain of 30 amino acids. The two chains are linked by three disulfide bonds formed between A7 and B7, between A20 and B19, and between A6 and A11. B7 and A7 indicate the amino acid residues at position 7 of the B chain (starting from the N-terminus) and at position 7 of the A chain (starting from the N-terminus) of native human insulin. Amino acid residues at other positions are denoted in a similar way.

[0057] “Insulin analogue” is a generic term of a modified insulin polypeptide, comprising a molecule of two chains consisting of an A chain and a B chain, as well as a single-chain insulin analogue, that retains high sequence homology with native insulin. “Insulin analogue” exhibits some, all or enhanced activity relative to a corresponding native insulin or is converted in vivo or in vitro into a polypeptide exhibiting some, all or enhanced activity relative to a corresponding native insulin, e.g., a polypeptide having the structure of a native insulin with one or more amino acid additions, deletions or substitutions. Proinsulins, pre-proinsulins, insulin precursors, single chain insulin precursors of humans, animals, even non-mammalian animals and analogues of any of the foregoing are also referred to herein as insulin analogues. Many insulin analogues are known in the art. Unless otherwise specified, the term “insulin analogue” herein is used broadly to include native insulin and insulin analogues.

[0058] An “insulin receptor binding polypeptide” includes insulin analogues, insulin derivatives as well as insulin conjugates, and other polypeptides which bind insulin receptor, including insulin like growth factor-1 (IGF-1), insulin like growth factor-2 (IGF-2) and their analogues, derivatives and conjugates.

[0059] Amino acids in the present application are indicated with the positions in the A chain or the B chain, unless otherwise specified. For example, A14, B28, etc. all indicate an amino acid residue or a variety thereof at the corresponding position in the A chain or the B chain of the insulin, wherein the numbering in the A chain or the B chain of the insulin starts from the first position at the N-terminus.

[0060] When an amino acid residue is individually referred to, as an example, it can be expressed as A1C B1G, or B9H, meaning that the first amino acid in the A chain, the first amino acid in the B chain, and the ninth amino acid in the B chain is G, G, and H, respectively.

[0061] The numbering in the single-chain insulin compounds is specified in the description for the individual compounds.

[0062] A single chain insulin compound refers to a polypeptide sequence or a modified polypeptide sequence with the general structure of B chain-C_{L}-A chain, where the B chain is the B chain of insulin or an analogue thereof, the A chain is the A chain of insulin or an analogue thereof, and C_{L} is a peptidic segment connecting the C-terminus of the B chain to the N-terminus of the A chain.

[0063] GLP-1, GLP-1 Analogue and GLP-1 Receptor Binding Polypeptide:

[0064] Proglucagon includes two types of glucagon-like peptides, namely GLP-1 and GLP-2. GLP-1 is mainly secreted by Langerhans cells of the terminal jejunum, ileum and colon, existing primarily in two forms: GLP-1 (7-37) and GLP-1 (7-36) —NH₂. GLP-1 (7-36) —NH₂ is a native form of the GLP-1 in the human body, which among the GLP-1 peptides, has the strongest effect of promoting secretion of insulin.

[0065] The sequence of the GLP-1 (7-36) —NH₂ is

(SEQ ID NO: 205)
HAEGTFTSDVSSYLEGQAAKEFIAWLVKGR-NH₂;

[0066] the sequence of the GLP-1 (7-37) is

(SEQ ID NO: 206)
HAEGTFTSDVSSYLEGQAAKEFIAWLVKGRG.

[0067] The in vivo expression and activities of GLP-1 are regulated tightly. After alanine at the second position of the N-terminus is hydrolyzed by a dipeptidyl peptidase (DPP-IV), an inactive GLP-1 (9-36) —NH₂ is formed, which is a natural antagonist against GLP-1R in vivo. In the body, several metabolic products of GLP-1 after enzyme cleavage include GLP-1 (9-36), GLP-1 (7-35), and GLP-1 (7-34). GLP-1 (9-36) —NH₂ is the major catabolic product of GLP-1 and can reach an in vivo concentration that may be higher than that of GLP-1 (7-36) —NH₂ by 10 times. The in vivo half-time of GLP-1 lasts for less than 5 min with a metabolic rate of 12-13 min. In physiological state, the intact GLP-1 is excreted primarily by the kidney and excluded with the aid of tissues other than the kidney.

[0068] GLP-1 are capable of facilitating insulin secretion, and the facilitating effect is glucose-dependent, the higher the blood glucose, the stronger the effect. GLP-1 binds to its receptor on the cellular membrane of the β cells in pancreatic islet and facilitates the insulin secretion by increasing intracellular cAMP, phosphorylating K⁺-ATPase, causing the K⁺ channels to be shut down, depolarization of cellular membrane, opening of Ca²⁺ channels, influx of Ca²⁺, thus stimulating the insulin secretion from cells. Such an effect is versatile, affecting various function aspects, such as transcription, translation, splicing, etc. of the pro-insulin gene. In addition, GLP-1 can also up-regulate the genes in β cells closely associated with glycol metabolism (such as glucokinase and glucose transporter-2). However, the promoter of the insulin gene can be activated partially in a PKA-independent manner.

[0069] GLP-1 can also stimulate proliferation of the β cells in pancreatic islet and suppress apoptosis thereof. It has been found in studies that GLP-1 can stimulate neogenesis of the β cells in a non-STZ rat model and improve self-stabilization of the blood glucose in adult rats. In a neonatal GK rat, the constant status of blood glucose was significantly improved, the insulin level was raised, and the volume of β cells was enlarged after injection with GLP-1 or Exendin-4 for 5 days. With continuous administration of the above-mentioned medicament, the number of β cells in the rats are increased steadily, and the blood glucose controlling capability is significantly increased upon adult. It was found in in vitro culture that GLP-1 can induce differentiation of a mouse myoblast line and embryonic stem cells into the insulin-expressing cells. In a Zucker rat model of diabetes where the proportion of β cells undergoing apoptosis is up to more than 20%, treatment with GLP-1 can reduce the proportion of the apoptotic cell significantly. It has been found in studies that GLP-1 can suppress the streptozocin (STZ)-induced apoptosis of 3 cells in mice, while the 3 cells in the mice having the GLP-1R gene knocked out are significantly sensitive to the STZ-induced apoptosis.

[0070] In regulation of the blood glucose, the effect of glucagon is contrary to that of insulin in that the former increases the concentration of blood glucose by promoting glycogenolysis. It has been shown in both the healthy and patients with type 1 diabetes and type 2 diabetes that GLP-1 can suppress the release of glucagon, although the degree of suppression in the healthy is less than that in patients with diabetes. Injection of GLP-1 into a C-peptide-negative canine can decrease the plasma level of glucagon, suggesting that suppression of GLP-1 on glucagon is at least partially insulin-independent.

[0071] In a series of studies with murine, porcine and human, it was found that GLP-1 can suppress peristalsis of the gastrointestinal tract and secretion of stomach fluid and delay gastric emptying. In human being, administration of GLP-1 in both the healthy and patients with diabetes can result in temporary satiety and decreased appetite.

[0072] GLP-1 receptor (GLP-1R) is a G protein-coupled receptor with seven trans-membrane domains using cAMP as the major second messenger. It belongs to the subfamily of glucagon receptors under the B family of G protein-coupled receptors (the secretin family), of which family the most noted characteristic is an extracellular N-terminal sequence which is relatively longer and forms a spherical domain through 3 disulfide bonds. The human GLP-1 receptor has a homology of 90% with the corresponding murine receptor. The anatomic evidences demonstrate that cells with GLP-1R can be found in each of the segments of the intestinal tract in the murine, porcine and human, the distribution densities thereof vary among different species and genera, and the rule for distribution thereof is identical, that is, distribution densities of the cells with GLP-1R progressively increase from the proximal end to distal end of small intestine and the large intestine.

[0073] The amino acid sequence of the proglucagon 72-117 is referred to Bell, et al., Nature 304 368-371 (1983). The proglucagon fragment 72-108 is typically designated as GLP-1 (1-37). GLP-1 (7-20) is an insulinotropic GLP-1 analogue with the shortest length as far as known.

[0074] “GLP-1 analogue” is defined as the one in which one or more of amino acid residues of GLP-1 (1-37) are deleted or substituted with other amino acid residues, or the one of which one or more of amino acid residues are inserted into the original polypeptide sequence. In a preferred embodiment, total number of amino acid residues that are different between the GLP-1 analogues and the corresponding GLP-1 (1-37) is not more than 20, or not more than 15, 10, 5, 4, 3, and 2, and most preferably is 1. GLP-1 analogues may be truncated fragments of GLP-1 (1-37). GLP-1 analogues may also be sequences obtained by extending from the N- or C-terminus of GLP-1. In certain embodiments, GLP-1 analogues comprise an extension of 1-20 of amino acids at the C-terminus. In one embodiment, the sequence extending from the C-terminus is a PSSGAPPPS-NH₂ (SEQ ID NO:438) or GPSSGAPPPS-NH₂(SEQ ID NO:437). In one embodiment, C-terminal extension comprises 1-6 of positively charged amino acids, such as arginine, lysine. In one embodiment, C-terminal extension comprises 1-6 of negatively charged amino acids, such as glutamic acid, aspartic acid. In certain embodiments, the GLP-1 analogues may be a modified product, such as a product subjected to alkyl substitution, acylation, polyethylene glycol modification, etc.

[0075] Different GLP-1s have different biological activities. Capability for GLP-1 (7-36) —NH₂ to stimulate accumulation of [¹⁴C]-amidopyrine is higher than those of GLP-1 (1-37) and GLP-1 (1-36) —NH₂ by 100 times; GLP-1 (7-36) —NH₂ and GLP-1 (7-37) —NH₂ have comparable activities and effects. GLP-1 (9-36) —NH₂ has no effect on the β cells and even acts as an antagonist against the adenylate cyclase in some studies; while it is apparent that GLP-1 (7-35) —OH and GLP-1 (7-34) —OH are agonists. Capability for GLP-1 (7-35) —OH or GLP-1 (7-37) —OH to raise the insulin level in plasma is lower than that of GLP-1 (7-36) —NH₂.

[0076] The part in GLP-1 (7-36) —NH₂ which binds to the receptor is primarily the amino acid residues 7-21, although the full length sequence can play a concerted role in binding to the receptor. In addition to the skeleton of the long amino acid chain, the side chains on the amino acid residues at positions 7 (histidine), 10 (glycine), 12 (phenylalanine), 13 (threonine) and 15 (aspartic acid) are directly involved in interaction with the receptor. Furthermore, the amino acid residues at positions 28 (phenylalanine) and 29 (isoleucine) are very critical for GLP-1 to form a conformation that can be recognized by the receptor. Some studies have demonstrated that the amino acid residues at positions 10 (glycine), 15 (aspartic acid) and 17 (serine) in the sequence as well as the C-terminus of the sequence are very important for insulinotropic effect of GLP-1. For the effect of GLP-1, amidation at the C-terminus and the last amino acid residue at C-terminus are less important than the N-terminus.

[0077] The GLP-1 receptor antagonist is derivated primarily from the sequences resulting from N-terminal deletion or substitution of GLP-1 (7-36) —NH₂ or exendin-4, and comprises, but not be limited to, the following sequences:

1.
(SEQ ID NO: 207)
DLSKQMEEEAVRLFIEWLKNGGPSSGAPPPS-NH₂;
2.
(SEQ ID NO: 208)
HAKGTFTSDVSSYLEGQAAKEFIAWLVKGR-NH₂;
3.
(SEQ ID NO: 209)
EGTFTSDVSSYLEGQAAKEFIAWLVKGR-NH₂;
4.
(SEQ ID NO: 210)
AEGTFTSEVSSYLEGQAAKEFIAWLVKGR-NH₂.

[0078] The analogues of GLP-1 include these polypeptides which are different from GLP-1 (7-37) in the amino acid sequence by 1-15 of amino acid residues, comprising substitutions or modifications at positions 11, 12, 16, 22, 23, 24, 25, 26, 27, 30, 33, 34, 35, 36, and 37. Positions 18, 20, 23, 30, 31, 34, 36, 37 or the C-terminus of these polypeptides may be linked to a modifying group, such as an albumin binding molecule or polyethylene glycol, etc. (WO2009030738). The GLP-1 receptor binding polypeptide includes any polypeptide which has a GLP-1 receptor-binding capability amounting to 1%, 5%, 10%, 20%, 30%, 40%, 50%, 60%, 70%, 80%, 90%, 100%, or more than 100% of that of GLP-1 (7-36) —NH₂, and derivatives thereof, such as GLP-1 analogues, GLP-1 receptor agonists, GLP-1 receptor antagonists, dual-agonist (coagonist) of GLP-1 and glucagon receptors, chimeric polypeptides of the GLP-1 receptor agonists and the glucagon receptor antagonist, glucagon receptor antagonists and the derivatives of these polypeptides, including the sequences in publications and literatures, such as, U.S. Pat. No. 7,235,627, WO/2002/048192, WO/2004/093823, WO/2003/103572, WO/2008/101017, WO/2009/058734, WO/2009/155258, WO/2010/070253, WO/2010/070255, WO/2011/075393, WO/2011/080102, WO/2011/073328, EP2322545, EP 2322546, “Design of a Long Acting Peptide Functioning as Both a Glucagon-like Peptide-1 Receptor Agonist and a Glucagon Receptor Antagonist,” The Journal of Biological Chemistry 2006, Vol. 281(18): 12506-12515.

[0079] With the progressive insight into GLP-1 and its correlation with diabetes, this field is becoming more focused by medicine R & D organizations at home and abroad. The representative medicaments are Exendin-4 and liraglutide.

[0080] Liraglutide has a similarity of 97% in amino acid sequence to human endogenous GLP-1 (7-37), with its sequence as follows:

(SEQ ID NO: 211)
HAEGTFTSDVSSYLEGQAAK(γE-C16)EFIAWLVRGRG-OH.

[0081] Other GLP-1-like candidate agents include albiglutide, taspoglutide, lixisenatide (AVE0010 or ZP10A), etc.

[0082] Albiglutide is a GLP-1 dimer fused to human albumin, which has a resistance to DPP-IV hydrolysis and a half-time of 4-7 days.

[0083] The sequence of Lixisenatide is

(SEQ ID NO: 212)
HGEGTFTSDLSKQMEEEAVRLFIEWLKNGGPSSGAPPSKKKKKK-NH₂.

[0084] Taspoglutide is an amide derivative of the human GLP-1 (7-36) with the following modification: (2-methylalanine)-35-(2-methylalanine)-36-L-arginine and its sequence is

(SEQ ID NO: 213)
HAibEGTFTSDVSSYLEGQAAKEFIAWLVKAibR-NH₂.

[0085] Exenatide, a synthetic product of exendin-4, consists of 39 amino acids and has a sequence homology of up to 53% with GLP-1 and the identical biological function. The sequence thereof is

(SEQ ID NO: 214)
HGEGTFTSDLSKQMEEEAVRLFIEWLKNGGPSSGAPPPS-NH₂.

[0086] Exendin-3 is obtained from the secretory product of Heloderma horridum with the sequence

(SEQ ID NO: 215)
HSDGTFTSDLSKQMEEEAVRLFIEWLKNGGPSSGAPPPS-NH₂.

[0087] “Exendin-3 analogue” is defined as the one in which one or more of the amino acid residues of Exendin-3 are deleted or substituted with other amino acid residues, or the one of which one or more of amino acid residues are inserted into the original polypeptide sequence. The analogues of Exendin-3 include these polypeptides which are different from exendin-3 in the amino acid sequence by 1-15 amino acid residues.

[0088] “Exendin-4 analogue” is defined as the one in which one or more of the amino acid residues of Exendin-4 are deleted or substituted with other amino acid residues, or the one of which one or more of amino acid residues are inserted into the original polypeptide sequence. In a preferred embodiment, total number of amino acid residues that are different between the exendin-4 analogue and exendin-4 may be not more than 15, 10, 5, 4, 3, and 2, most preferably be 1, such as leucine 14, phenylalanine 25-exendin-4. Exendin-4 analogues may be truncated fragments of exendin-4 such as exendin-4 (1-28) —NH₂, exendin-4 (1-30), exendin-4 (1-30) —NH₂, leucine 14, phenylalanine 25-exendin-4 (1-28) —NH₂, leucine 14, alanine 22, phenylalanine 25-exendin-4 (1-28) —NH₂.

[0089] The present invention encompasses the full length or truncated sequences of exendin-3 and exendin-4, comprising exendin-3 (1-30) or exendin-4 (1-30) sequences, in which the C-terminus of these sequences may be shorten by three amino acid residues, preferably one amino acid residue; and the N-terminus thereof may be shorten by two amino acid residues, preferably one amino acid residue. Although the amino acid sequences are shortened, all these fragments of exendin have biological activity.

[0090] The present invention comprises the sequences extending from C-terminus of exendin-3 and exendin-4. In one embodiment, C-terminal extension comprises 1-6 of positively charged amino acids such as arginine, lysine. In one embodiment, C-terminal extension comprises 1-6 of negatively charged amino acids such as glutamic acid, aspartic acid. In certain embodiments, the analogues of exendin-3 and exendin-4 may be a modified product such as a product subjected to alkyl substitution, acylation, polyethylene glycol modification, etc.

[0091] GLP-1 receptor binding polypeptides with exendin-3 and exendin-4 as templates include any polypeptide and a derivative thereof which has the GLP-1 receptor-binding capability amounting to 1%, 5%, 10%, 20%, 30%, 40%, 50%, 60%, 70%, 80%, 90%, 100%, or more than 100% of the capability of GLP-1 (7-36) —NH₂, comprising the sequences in the publications and patent documents, such as, the sequences mentioned in WO 97/46584, WO 98/05351, WO 99/25727, WO 99/25728, WO 99/07404, WO 99/40788, WO 00/41546, WO 00/41548, U.S. Pat. No. 7,691,963 B2, U.S. Pat. No. 7,407,932B2, U.S. Pat. No. 8,030,273B2, US 20010047084 A1, U.S. Pat. No. 5,424,286 A, WO/2013/002580, CN-200710138718.7, and CN200910135363.5, as well as in “EW, a novel recombinant analogue of exendin-4 expressed in Escherichia coli.” Scientific Research and Essays 2011 Vol. 6(14): 2941-2949, “Site-specific PEGylation of exenatide analogues markedly improved their glucoregulatory activity” British Journal of Pharmacology, 2011, 163: 399-412.

[0092] GIP and GIP receptor binding polypeptide

[0093] Gastric inhibitory peptide is also known as glucose-dependent insulinotropic polypeptide, abbreviated as GIP. When the blood glucose concentration is high, GIP can regulate the blood glucose by facilitating secretion of the insulin. Furthermore, GIP plays a key role in adipocytes and fat metabolism.

[0094] The sequence of human GIP is

(SEQ ID NO: 216)
YAEGTFISDYSIAMDKIHQQDFVNWLLAQKGKKNDWKHNITQ.

[0095] “GIP analogue” is defined as the one in which one or more of the amino acid residues of GIP are deleted or substituted with other amino acid residues, or the one of which one or more of amino acid residues are inserted into the original polypeptide sequence. In one embodiment, GIP analogue is at least 25%, 30%, 40%, 50%, 60%, 70%, 80%, and 90% identical in the sequence to the human GIP. In a preferred embodiment, total number of amino acid residues that are different between the GIP analogue and human GIP may be not more than 20, 15, 10, 5, 4, 3, and 2, most preferably be 1. In certain embodiments, the amino acid substitution may be at positions 1, 2, 3, 7, 10, 12, 15, 16, 17, 18, 19, 20, 21, 23, 24, 27, 28, and 29. GIP analogues may be truncated fragments of the GIP(1-42). In one embodiment, GIP analogues comprise the sequences obtained after removing 1-12 of the amino acid residues from C-terminus of the GIP(1-42), such as, GIP(1-38), GIP(1-39), GIP(1-30) —NH₂, etc. In one embodiment, GIP analogues comprise a polypeptide sequence of at least twelve amino acid residues starting from the N-terminus of GIP(1-42). In certain embodiments, GIP analogues comprise an extension of 1-20 of the amino acids at the C-terminus. In one embodiment, C-terminal extension comprises 1-6 of positively charged amino acids, such as arginine, lysine. In one embodiment, C-terminal extension comprises 1-6 of negatively charged amino acids, such as glutamic acid, aspartic acid. In certain embodiments, the GIP analogues may be a modified product, such as a product subjected to alkyl substitution, acylation, polyethylene glycol modification, etc.

[0096] GIP analogues and derivatives thereof may be found in a wide variety of literatures. Part of the GIP agonists can be found in the publications, such as, Salhanick, et al., Bioorg Med Chem Lett 2005, 15(18): 4114-4117; Green, et al., Diabetes 2005, 7(5): 595-604; Gault, et al., Biochem J 2002, 367 (Pt3): 913-920; Gault, et al., J Endocrin 2003; 176: 133-141; Irwin, et al., Diabetes Obes Metab 11(6): 603-610 (epub 2009), etc. Examples of other GIP analogues are N-AcGIP (LysPAL³⁷) (Irwin, et al., “A Novel, Long-Acting Agonist of Glucose-Dependent Insulinotropic Polypeptide Suitable for Once-Daily Administration in Type 2 Diabetes”, J Pharmacol Exp Ther, 2005 Vol. 314 No. 3:1187-1194), GIP(1-40), GIP(1-30) —NH₂, GIP(19-30) —NH₂, GIP(1-14) (Hinke, et al., “Identification of a bioactive domain in the amino-terminus of glucose-dependent insulinotropic polypeptide (GIP)”, Biochimica et Biophysica Acta 2001, Vol. 1547:143-155). Since the C-terminal fragment of GIP is more potent in promoting adipogenesis, partial or complete removing of the C-terminus is one of the procedures that decrease the effect in this aspect of a GIP agonist, such as GIP(1-30) —NH₂. Studies on structure-activity relationship have shown that the fragment 19-30 of GIP is critical to insulin response (“The insulinotropic region of gastric inhibitory polypeptide; fragment analysis suggests the bioactive site lies between residues 19 and 30.” Can J Physiol Pharmacol. 1996 January; 74(1):65-72).

[0097] One determinant important for GIP activities is hydrolysis of the N-terminus of the polypeptide by DPP-4 enzyme into inactive GIP(3-42). Appropriate modification on an N-terminal residue at position 1, 2, or 3 of GIP can result in a resistance to degradation by DPP-4, even increase the biological activities of the GIP analogues. [D-Ala2]-GIP(1-42) is a super agonist to GIP receptor in a normal mouse in comparison with the native GIP, while the supernormal activity is not correlated totally with its effect on insulin in blood (“Dipeptidyl Peptidase IV-Resistant [D-Ala2]Glucose-Dependent Insulinotropic Polypeptide (GIP) Improves Glucose Tolerance in Normal and Obese Diabetic Rats”, Diabetes 2002 51: 652-661).

[0098] Removing N-terminal amino acid residues of GIP often yields GIP receptor antagonist. GIP(10-30) —NH₂, GIP(6-30) —NH₂ and GIP (7-30) —NH₂ are GIP receptor antagonists, in which the binding capacity of GIP(6-30) —NH₂ to the GIP receptor is comparable to that of GIP(1-42) (Gelling et al., “GIP(6-30 amide) contains the high affinity binding region of GIP and is a potent inhibitor of GIP1-42 action in vitro.” Regul Pept. 1997, 69(3):151-154; “Postprandial stimulation of insulin release by glucose-dependent insulinotropic polypeptide (GIP). Effect of a specific glucose-dependent insulinotropic polypeptide receptor antagonist in the rat”, J Clin Invest. 1996 December 1; 98(11): 2440-2445). Other GIP antagonists include GIP(15-42), GIP(15-30), GIP(16-30), and GIP(17-30). A GIP analogue Pro3-GIP (“Characterization of the cellular and metabolic effects of a novel enzyme-resistant antagonist of glucose-dependent insulinotropic polypeptide.” Biochem Biophys Res Commun. 2002 February 8; 290(5):1420-6) antagonizes the effect of GIP in vitro in cells and in vivo in the obese diabetic ob/ob mice (“Effects of the novel (Pro(3)) GIP antagonist and exendin(9-39)amide on GIP- and GLP-1-induced cyclic AMP generation, insulin secretion and postprandial insulin release in obese diabetic (ob/ob) mice: evidence that GIP is the major physiological incretin.” Diabetologia. 2003 February; 46(2):222-30; “Effects of the novel (Pro(3)) GIP antagonist and exendin(9-39)amide on GIP- and GLP-1-induced cyclic AMP generation, insulin secretion and postprandial insulin release in obese diabetic (ob/ob) mice: evidence that GIP is the major physiological incretin. Diabetologia. 2003 February; 46(2):222-30). After injection with Pro3-GIP for 50 consecutive days, the adult, diabetic mice fed on a high-fat diet have decrease in body weight, in accumulation of adipose tissue, significant improvement in levels of glucose, saccharified hemoglobin and insulin, and decrease in levels of triglycerides in the muscle and the liver (McClean, et al., “GIP receptor antagonism reverses obesity, insulin resistance and associated metabolic disturbances induced in mice by prolonged consumption of high fat diet.” Am J Physiol Endocrinol Metab. 2007 December; 293(6):E1746-55).

[0099] The features of type 2 diabetes include insulin resistance and dysfunction of pancreatic islet β cells with varying degree. In European and United States, insulin resistance and obesity are major pathological characteristics of patients with diabetes. In Asia, impaired insulin secretion is the main cause. Consequently, a GIP agonist is likely to benefit patients with impaired insulin secretion, in particular patients in Asia, while GIP inhibitor is likely to benefit obesity patients with insulin resistance, in particular patients in Europe and America.

[0100] In certain embodiments, the component from which a fusion protein or dimeric protein is formed together with the interleukin-1 receptor binding polypeptide are GIP agonists, GIP inhibitors, GLP-1/GIP receptors dual-agonists, glucagon/GIP receptors dual-agonists, GLP-1/GIP/glucagon receptors tri-agonists (e.g., those mentioned in WO/2010/011439, WO2010148089 A1, US2012/0172295, US 2011/0166062, US2012/0322725), GLP-1 agonists/GIP inhibitors, or chimeric polypeptide (e.g., HG-GIP(3-30) —NH₂, HG-GIP(3-30)-exendin-4 (31-39) —NH₂, Ser2-GIP(1-30) —NH₂, Ser2-GIP(1-30)-exendin-4 (31-39) —NH₂, dAla2-GIP(1-30)-exendin-4 (31-39) —NH₂). In the present invention, GIP receptor binding polypeptides may be any of the above-mentioned polypeptide sequences able to bind to GIP receptors. A GIP receptor binding polypeptide includes any polypeptide sequence with a binding capacity to the GIP receptor that amounts to 0.1%, 0.2%, 0.3%, 0.4%, 0.5%, 0.6%, 0.7%, 0.8%, 0.9%, 1%, 5%, 10%, 20%, 30%, 40%, 50%, 60%, 70%, 80%, 90%, 100% or higher of the binding capacity of GIP (1-42), and derivatives thereof, including GIP analogues.

[0101] GIP is effective in vitro in stimulating proliferation of 3 cells and protecting survival of β cells (“Glucose-Dependent Insulinotropic Polypeptide Is a Growth Factor for 3 (INS-1) Cells by Pleiotropic Signaling.” Mol Endocrinol. 2001 September; 15(9):1559-70; “Mechanisms of mitogenic and anti-apoptotic signaling by glucose-dependent insulinotropic polypeptide in beta(INS-1)-cells”, J Endocrinol. 2002 August, 174(2):233-46; “Glucose-dependent insulinotropic polypeptide promotes beta-(INS-1) cell survival via cyclic adenosine monophosphate-mediated caspase-3 inhibition and regulation of p38 mitogen-activated protein kinase”, Endocrinology. 2003 October, 144(10):4433-45). Many studies have demonstrated that GIP analogues are very potent in protecting survival in the rat model of type 2 diabetes and in INS-1β cells (“A GIP receptor agonist exhibits beta-cell anti-apoptotic actions in rat models of diabetes resulting in improved beta-cell function and glycemic control”, PLoS One. 2010 March 9; 5(3):e9590; “GIP stimulation of pancreatic beta-cell survival is dependent upon phosphatidylinositol 3-kinase (PI3-K)/protein kinase B (PKB) signaling, inactivation of the forkhead transcription factor Foxo1 and downregulation of bax expression. J Biol Chem. 2005, 280(23):22297-307).

[0102] Since GIP exhibits protection on the pancreatic islet β cells, a fusion protein, dimeric protein or cross-linking protein consisting of the GIP and an interleukin-1 receptor binding polypeptide would exert better effects. In the present invention, the linking pattern for the GIP receptor binding polypeptide and the interleukin-1 receptor binding polypeptide can be referred to the pattern for GLP-1 receptor binding polypeptide and the interleukin-1 receptor binding polypeptide.

[0103] Interleukin-1 Receptor Antagonistic Protein:

[0104] An “interleukin-1 receptor antagonistic protein” includes an interleukin-1 receptor antagonist (an IL-1ra) and an analogue and derivative thereof.

[0105] The family of IL-1 receptors include several receptors. Accordingly, there are several different agonists and antagonists. These antagonists do not necessarily bind to the same IL-1 receptor from the family. Herein, the IL-1ra is used to stand for all of IL-1 antagonists of all receptors of the IL-1 receptor family. The IL-1ra includes human IL-1Ra (hIL-1Ra), an analogue, a derivative or a functional equivalent thereof. The functional equivalent has the biological activities of hIL-1Ra, such as capable of binding to the IL-1 receptor, not producing the downstream signal transduction, and hindering the binding of IL-1 to the IL-1 receptor. Examples may be referred to U.S. Pat. Nos. 6,096,728, 6,541,623, 6,365,726, and 6,399,573.

[0106] For description of the methods for preparing the preferred IL-1ra (including glycosylated and non-glycosylated forms) and use thereof, see U.S. Pat. No. 5,075,222, WO 91/08285, WO 91/17184, AU 9173636, WO 92/16221, and WO 96/22793. Specifically, U.S. Pat. No. 5,075,222 describes three forms of IL-1Ra. The first form IL-1Raa is characterized by the molecular weight of 22-23 kD on SDS-PAGE, an isoelectric point of approximately 4.8, and elution with a Tris buffer (pH 7.6) containing approximately 52 mM NaCl from Mono Q FPLC column. The second form IL-1Ra3 is a protein with a molecular weight of 22-23 kD, and is eluted with a Tris buffer containing 48 mM NaCl from Mono Q FPLC column. Both the IL-1Raa and the IL-1Ra3 are glycosylated. The third form IL-1Rax has the molecular weight of about 20 kD, is eluted with a Tris buffer containing 48 mM NaCl from Mono Q FPLC column, and non-glycosylated. The three antagonists have similar functions and immunological activities.

[0107] At present, it is known that IL-1Ra includes a secretory sub-type (sIL-1Ra) and three kinds of intracellular sub-type (icIL-1Ra1, 2, and 3).

[0108] The IL-1Ra set forth in the present invention may be a naturally secreted human IL-1Ra or a genetically recombinant human IL-1Ra, preferably a genetically recombinant human IL-1Ra.

[0109] In some embodiments, IL-1ra comprises anakinra and an analogue thereof. The sequence of anakinra is

(SEQ ID NO: 217)
MRPSGRKSSKMQAFRIWDVNQKTFYLRNNQLVAGYLQGPNVNLEEKIDV
VPIEPHALFLGIHGGKMCLSCVKSGDETRLQLEAVNITDLSENRKQDKR
FAFIRSDSGPTTSFESAACPGWFLCTAMEADQPVSLTNMPDEGVMVTKF
YFQEDE.

[0110] in which two cysteines at positions 70 and 117 can form a disulfide linkage.

[0111] The IL-1ra and an analogue thereof in the present invention may be prepared and produced by using bioengineering technologies. For convenience of expressing and producing the protein, methionine can be added at the N-terminus of the sequences of the individual proteins in the present invention if needed, without influencing the biological activity of original sequence. Anakinra is the one where a methionine is added at the N-terminus of non-glycosylated hIL-1Ra.

[0112] In some embodiments, IL-1ra comprises one or more glycosylation moiety.

[0113] In the present invention, the amino acid sequence of IL-1ra can be altered without affecting the biological activity thereof. For example, one of the IL-1ra analogues may comprise one or more of conservative amino acid substitutions. The conservative amino acid substitution is the one where an amino acid residue is replaced with another amino acid residue having a similar side chain. Amino acid residues can be classified according to the nature of the side chain of an amino acid residue in literatures. Amino acid residues with a basic side chain comprise lysine, arginine, histidine; amino acid residues with an acidic side chain and an acylamide side chain comprise aspartic acid, glutamic acid, asparagine, glutamine; amino acid residues with small aliphatic, non-polar, or weak polar side chains comprise glycine, alanine, threonine, serine, proline; amino acid residues with large aliphatic and non-polar side chains comprise leucine, isoleucine, valine; aromatic amino acid residues comprise phenylalanine, tryptophan, tyrosine; amino acid residues with a sulphur-containing side chain comprise cysteine and methionine.

[0114] An IL-1ra analogue involved in the present invention comprises deletion of part of the amino acid residues in the amino acid sequence of IL-1ra (deletion analogue), substitutions with natural or non-natural amino acid residues (substitution analogue) or insertions (insertion analogue). The IL-1ra deletion analogue can typically have about 1-50 of amino acid residue deleted, more commonly have 1-10 of residues deleted. The IL-1ra insertion analogue may include fusion at the N- or C-terminus of IL-1ra, as well as one or more amino acid residues inserted into the internal sequence of IL-1ra. The terminal insertion of IL-1ra includes a chimeric protein. In one embodiment, the chimeric protein includes IL-1ra and the whole or parts of the constant regions in the heavy or light chain of a human immunoglobulin. The immunoglobulin portion of the preferred chimeric protein may comprise all constant regions except the first domain in the heavy chain constant regions of a human immunoglobulin (e.g., IgG, IgA, IgM, or IgE). Any amino acid residue in the immunoglobulin portions can be deleted or substituted with one or more of amino acid residues, or can be inserted with one or more of amino acid residues, so long as said IL-1ra still antagonize the IL-1 receptor, and the immunoglobulin portions exhibit one or more of their characteristic properties. The chimeric protein at the terminus of IL-1ra can also comprise the partial or whole sequence of human albumin, any amino acid residue in the albumin portion can be deleted or substituted with one or more of amino acid residues, or can be inserted with one or more of amino acid residues.

[0115] Analogues of the interleukin-1 receptor antagonistic protein set forth in the present invention is homologous approximately to IL-1Ra. The term “homologous approximately to” used herein refers to the degree of homology more than 60%, 70%, 80%, 90%, even more than 95%. The homology percentage set forth herein is calculated by an algorithm described by Dayhoff (Atlas of Protein Sequence and Structure, 5:124 (1972), National Biochemical Research Foundation, Washington, D.C.).

[0116] The IL-1ra can have a biological activity amounting to 1%, 2%, 3%, 4%, 5%, 10%, 20%, 30%, 40%, 50%, 60%, 70%, 80%, 90%, 100% or higher of the biological activity of hIL-1Ra for interleukin-1 receptor.

[0117] The person skilled in the art can prepare a chemically or biologically modified IL-1ra, an analogue, and a derivative thereof. A conjugate can be prepared with a glycosylated, non-glycosylated or deglycosylated IL-1ra and an IL-1ra analogue, and a chemically modifying group used includes water-soluble polymers (e.g., polyethylene glycol) and fatty acids. One IL-1ra analogue may comprise one or more of modifying groups. The chemically modifying group is typically linked to the IL-1ra through an α- or ε-amino group of an amino acid residue or an active thiol group in the IL-1ra. An amino acid residue having free amino group includes lysine residue and an amino acid residue at the N-terminus. An amino acid residue having active thiol group includes cysteine residue.

[0118] Special substitution of an amino acid residue in the IL-1ra sequence may be of particular use, e.g., addition of a cysteine or lysine residue is favorable to linkage of modifying groups according to the embodiment method to form a conjugate. In addition, a N- or O-linked glycosylated site can be added or deleted in the sequence of IL-1ra. An asparagine-linked glycosylation recognition site includes tripeptide sequences Asn-Xaa-Ser/Thr recognized by a suitable cellular glycosylase, wherein Xaa may be any of the natural amino acids except Pro. In a mature hIL-1Ra, the asparagine at position 84 is a glycosylated site. The molecular weight of the glycosylated IL-1ra can be varied depending on the varied degree of glycosylation. The interleukin-1 receptor antagonistic protein portion in the fusion protein, dimeric protein or cross-linking protein may be linked to the modifying group (e.g., polyethylene glycol) through a mercapto group on the side chain of cysteine.

[0119] The numbering for the amino acid residues in a mature hIL-1Ra is based on the following amino acid sequence, with the position of the first amino acid residue at N-terminus being the first position:

(SEQ ID NO: 218)
RPSGRKSSKMQAFRIWDVNQKTFYLRNNQLVAGYLQGPNVNLEEKIDVV
PIEPHALFLGIHGGKMCLSCVKSGDETRLQLEAVNITDLSENRKQDKRF
AFIRSDSGPTTSPESAACPGWFLCTAMEADQPVSLTNMPDEGVMVTKFY
FQEDE.

[0120] Four cysteines (C66, C69, C116, and C122) are present in the sequence of the above-mentioned natural IL-1ra. According to the method implemented in the present invention, the cysteine at position 116 (C116) is the special site in IL-1ra at which the modifying group (e.g., mono-polyethylene glycol) activated by maleimide or haloacetyl (e.g., I—CH₂—CO—) is reacted. In human IL-1ra, the other three cysteines is not easy to be reacted with the modifying group activated by maleimide or haloacetyl. For linking the modifying group to different sites of IL-1ra or conferring more than one modifying groups on IL-1ra, a cysteine residue can be substituted for an amino acid residue at the particular site. The IL-1ra analogues include the sequences where the cysteine residue is added at the N- or C-terminus of a protein, the sequences where the cysteine residue is substituted for the amino acid residues at original positions 6, 8, 9, 84, or 141, or the sequences where the cysteine at position 116 is substituted with a serine or one or more of the four cysteines is substituted with a serine. In addition to the IL-1ra with a single modifying group, the IL-1ra may further comprise the combination of the above-mentioned modifications, so that more than one cysteine will be reacted with the modifying groups.

[0121] The sequences of the IL-1ra analogues in the corresponding section are as follows:

(SEQ ID NO: 219)
CRPSGRKSSKMQAFRIWDVNQKTFYLRNNQLVAGYLQGPNVNLEEKIDVV
PIEPHALFLGIHGGKMCLSCVKSGDETRLQLEAVNITDLSENRKQDKRFA
FIRSDSGPTTSFESAASPGWFLCTAMEADQPVSLTNMPDEGVMVTKFYFQ
EDE;
(SEQ ID NO: 220)
CRPSGRKSSKMQAFRIWDVNQKTFYLRNNQLVAGYLQGPNVNLEEKIDVV
PIEPHALFLGIHGGKMCLSCVKSGDETRLQLEAVNITDLSENRKQDKRFA
FIRSDSGPTTSFESAACPGWFLCTAMEADQPVSLTNMPDEGVMVTKFYFQ
EDE;
(SEQ ID NO: 221)
CRPSGRKSSKMQAFRIWDVNQKTFYLRNNQLVAGYLQGPNVNLEEKIDVV
PIEPHALFLGIHGGKMCLSCVKSGDETRLQLEAVCITDLSENRKQDKRFA
FIRSDSGPTTSFESAASPGWFLCTAMEADQPVSLTNMPDEGVMVTKFYFQ
EDE;
(SEQ ID NO: 222)
RPSGRKSSKMQAFRIWDVNQKTFYLRNNQLVAGYLQGPNVNLEEKIDVVP
IEPHALFLGIHGGKMCLSCVKSGDETRLQLEAVCITDLSENRKQDKRFAF
IRSDSGPTTSFESAASPGWFLCTAMEADQPVSLTNMPDEGVMVTKFYFQE
DE;
(SEQ ID NO: 223)
RPSGRKSSKMQAFRIWDVNQKTFYLRNNQLVAGYLQGPNVNLEEKIDVVP
IEPHALFLGIHGGKMCLSCVKSGDETRLQLEAVCITDLSENRKQDKRFAF
IRSDSGPTTSFESAACPGWFLCTAMEADQPVSLTNMPDEGVMVTKFYFQE
DE;
(SEQ ID NO: 224)
RPSGRCSSKMQAERIWDVNQKTFYLRNNQLVAGYLQGPNVNLEEKIDVVP
IEPHALFLGIHGGKMCLSCVKSGDETRLQLEAVNITDLSENRKQDKRFAF
IRSDSGPTTSPESAASPGWFLCTAMEADQPVSLTNMPDEGVMVTKFYFQE
DE;
(SEQ ID NO: 225)
RPSGRCSSKMQAFRIWDVNQKTFYLRNNQLVAGYLQGPNVNLEEKIDVVP
IEPHALFLGIHGGKMCLSCVKSGDETRLQLEAVNITDLSENRKQDKRFAF
IRSDSGPTTSPESAACPGWFLCTAMEADQPVSLTNMPDEGVMVTKFYFQE
DE;
(SEQ ID NO: 226)
RPSGRKSCKMQAFRIWDVNQKTFYLRNNQLVAGYLQGPNVNLEEKIDVVP
IEPHALFLGIHGGKMCLSCVKSGDETRLQLEAVNITDLSENRKQDKRFAF
IRSDSGPTTSPESAASPGWFLCTAMEADQPVSLTNMPDEGVMVTKFYFQE
DE;
(SEQ ID NO: 227)
RPSGRKSCKMQAFRIWDVNQKTFYLRNNQLVAGYLQGPNVNLEEKIDVVP
IEPHALFLGIHGGKMCLSCVKSGDETRLQLEAVNITDLSENRKQDKRFAF
IRSDSGPTTSPESAACPGWFLCTAMEADQPVSLTNMPDEGVMVTKFYFQE
DE;
(SEQ ID NO: 228)
RPSGRKSSCMQAFRIWDVNQKTFYLRNNQLVAGYLQGPNVNLEEKIDVVP
IEPHALFLGIHGGKMCLSCVKSGDETRLQLEAVNITDLSENRKQDKRFAF
IRSDSGPTTSPESAASPGWFLCTAMEADQPVSLTNMPDEGVMVTKFYFQE
DE;
(SEQ ID NO: 229)
RPSGRKSSCMQAFRIWDVNQKTFYLRNNQLVAGYLQGPNVNLEEKIDVVP
IEPHALFLGIHGGKMCLSCVKSGDETRLQLEAVNITDLSENRKQDKRFAF
IRSDSGPTTSPESAACPGWFLCTAMEADQPVSLTNMPDEGVMVTKFYFQE
DE;
or
(SEQ ID NO: 230)
RPSGRKSSKMQAFRIWDVNQKTFYLRNNQLVAGYLQGPNVNLEEKIDVVP
IEPHALFLGIHGGKMCLSCVKSGDETRLQLEAVNITDLSENRKQDKRFAF
IRSDSGPTTSPESAASPGWFLCTAMEADQPVSLTNMPDEGCMVTKFYFQE
DE.

[0122] All of these IL-1ra analogues may be used in synthesis of the fusion protein, dimeric protein or cross-linking protein of the present invention.

[0123] Modifying Moiety

[0124] Fusion proteins may contain one or more modifying moieties which provide a fusion protein, a dimeric protein, or a cross-linking protein with desired properties. For example, a modifying moiety can reduce the rate of degradation of a protein in various environments (such as the digestive tract and the blood). Preferred modifying moieties are those which permit a protein to retain a comparative binding activity to the receptor. Further, preferred modifying moieties are those which are amphiphilic or hydrophilic, or which make the modified protein more hydrophilic and less lipophilic than a corresponding unmodified protein. The modifying moieties may include degradable or hydrolizable linkages, such as lactide, glycolide, carbonate, ester, carbamate and the like. This approach allows the polymers to be degraded into lower molecular weight fragments.

[0125] The modifying moiety can include one or more hydrophilic moieties, lipophilic moieties, amphiphilic moieties, salt forming moieties, spacer moieties, linking moieties, and terminating moieties, and combinations thereof. The various moieties can be linked together by a covalent bond, or by hydrolizable or non-hydrolizable bonds. Representative hydrophilic, lipophilic and amphiphilic moieties are described in more detail below.

[0126] Hydrophilic Moieties

[0127] Examples of suitable hydrophilic moieties include PAG moieties, polysaccharides, polysorbate moieties, and combinations thereof.

[0128] Polyalkylene glycol (PAG) consists of multiple alkylene glycol units. In one embodiment, the units are all identical (e.g., polyethylene glycol (PEG) or polypropylene glycol (PPG)). In another embodiment, the alkylene glycol units are different. The polymers can be random copolymers (for example, the copolymer of ethylene oxide and propylene oxide) or branched or graft copolymers.

[0129] PEG in present invention is any water soluble polyethylene glycol or polyethylene oxide. PEG has the formula —(CH₂CH₂O)ₙ—, where n is an integer from 2 to 2000. One end of PEG is usually an inert functional group, e.g., an alkyl or alkoxy etc. Although PEG capped with a methoxy group is named mPEG with the formula CH₃O(CH₂CH₂O)ₙ—, they are still generally called PEG PEG20K is a polyethylene glycol of molecular weight 20,000.

[0130] The other end of PEG is generally an activated functional group or a functional group prone to form a covalent linkage, such as amino, carboxyl group, hydroxyl, mercapto group, aldehyde, etc. PEG-maleimide can be attached to the mercapto group on the side chain of a cysteine through Michael addition reaction; PEG-iodoacetyl (CO—CH₂—I) is reacted with the mercapto group-SH to form a stable thioether bond; PEG-NHS (succinimide) can be attached to the α-amino group of an amino acid residue or the ε-amino group on the side chain of a lysine through a nucleophilic substitution reaction (acylation); PEG-aldehyde can be attached to the amino group on a polypeptide under the action of a reductant (e.g., sodium cyano borhydride) through reductive alkylation reaction.

[0131] The commercial PEG reagents used in the invention include, but are not limited to, mPEG-SC (methyoxy-PEG-succinimidyl carbonate), mPEG-NHS (SCM) (or mPEG-SPA, succinimidyl ester of monomethoxypoly (ethylene glycol) propionic acid), NHS-PEG-NHS, mPEG-CHO (methoxy-PEG-propionaldehyde), ALD-PEG-ALD (acetaldehyde-PEG-acetaldehyde), PEG-Ts (methoxy-PEG-toluenesulfonic acid), Ts-PEG-Ts (toluenesulfonic acid-PEG-toluenesulfonic acid), mPEG-CDI (methoxy-PEG-carbonyl imidazole), CDI-PEG-CDI (carbonyl imidazole-PEG-carbonyl imidazole), mPEG-NPC (methoxy-PEG-nitrophenyl carbonate), mPEG-ISC (PEG-isocyanate), ISC-PEG-ISC (isocyanate-PEG-isocyanate), mPEG-EPO (methoxy-PEG-epoxide), EPO-PEG-EPO (epoxide-PEG-epoxide), mPEG-Mal (methoxy-PEG-maleimide), Mal-PEG-Mal (maleimide-PEG-maleimide), maleimide-PEG-NHS, maleimide-PEG-NH₂, maleimide-PEG-COOH, PEG-vinyl sulfone derivatives, (VS-PEG-X, X=NHS, maleimide, NH₂, COOH, etc), PEG-iodoacetamide derivatives (IA-PEG-X, X=NHS, maleimide, NH₂, COOH, etc.), mPEG-OPSS (methoxy-PEG-orthopyridyl disulfide), OPSS-PEG-NHS (orthopyridyldisulfide-PEG-succinimidyl ester), OPSS-PEG-NH₂, OPSS-PEG-OPSS.

[0132] The PEG in this invention can be linear, branched, forked, or dumbbell shaped. In one embodiment, a branched PEG can be represented by general formula R(-PEG-ₙOH)ₘ in which R represents a core group (typically polyhydric) such as pentaerythritol, sugar, lysine or glycerol; m represents the number of branches, and ranges from 2 to the maximum number of attachment sites on the core group; and n represents the number of PEG the number of PEG on each branch may be different. In another embodiment, a branched PEG can be represented by the general formula (CH₃O-PEG-ₙ)ₚR—Z, in which p equals 2 or 3, R is lysine or glycerol, Z is a reactive group. In one embodiment, forked PEG can be represented by the general formula PEG(-L-X)ₙ, in which L is a linking group and X represents a terminal reactive group.

[0133] PEG can be polydisperse with a polydispersity index less than 1.05. PEG can also be monodisperse. A monodisperse PEG is composed of molecules of the same length (molecular weight) rather than a mixture of molecules of similar length (molecular weight).

[0134] The term “alkyl” comprises saturated straight or branched hydrocarbon groups.

[0135] The term “alkoxy” comprises the free radical “alkyl-O-”. The representative example is methoxy, ethoxy, propoxy (e.g., 1-propoxy and 2-propoxy), butoxy (e.g., 1-butoxy, 2-butoxy, and 2-methyl-2-propoxy), pentyloxy, hexyloxy, etc.

[0136] Saccharide Moieties

[0137] Polypeptides and proteins in this invention can contain glycosylation sites. Glycosylation can not only improve drug efficacy and pharmacokinetics of a drug, but also act in drug targeting and delivery. A saccharide moiety can be O-linked or N-linked. O-linked saccharide is generally attached to the oxygen atom of hydroxyl group in serine or threonine. N-linked saccharide is attached to the nitrogen atom of the side chain amide in asparagine. Although GLP-1 receptor binding polypeptides are not usually glycosylated, serine at the C terminal of GLP-1-PSSGAPPPS-IgG Fc (SEQ ID NO:283) can be glycosylated and threonine (AEPKSCDKTHTCP . . . ) (SEQ ID NO:290), the 11^{st} amino acid residue at the N-terminal of Fc, can also be glycosylated.

[0138] Representative saccharide moieties include, but are not limited to, glycerol moieties, monosaccharide, disaccharide, trisaccharide, oligosaccharides, and polysaccharides such as starches, glycogen, cellulose and/or polysaccharide gums. Specific monosaccharides include C6 and above (preferably C6 to C8) saccharides such as glucose, fructose, mannose, galactose, ribose, and sedoheptulose; disaccharides and trisaccharides include moieties having two or three monosaccharide units (preferably C5 to C8) such as sucrose, cellobiose, maltose, lactose, and raffinose.

[0139] Other Hydrophilic Groups

[0140] Biocompatible polycation groups include polyamines having multiple amino groups on either the backbone or the side chains, such as poly(lysine) and other polyamino acids having multiple positive charges formed by natural or synthetic amino acids, including poly(ornithine), poly(arginine), and poly(histidine), and nonpolypeptide polyamines such as poly(aminostyrene), poly(aminoacrylate), poly (N-methyl aminoacrylate), polymers of quaternary amine etc. Biocompatible polyanion groups include groups having multiple carboxyls on either the backbone or the side chains, such as poly(aspartic acid) and poly(glutamic acid) etc. Other hydrophilic groups include natural or synthetic polysaccharides such as chitosan and glucan etc.

[0141] Polyanionic Bio-adhesives

[0142] Certain hydrophilic groups appear to have potentially useful bio-adhesive properties. Examples of such groups are found, for example, in U.S. Pat. No. 6,197,346. Those polymers containing multiple carboxyls exhibit bio-adhesive properties. Rapidly biodegradable polymers that expose multiple carboxyls upon degradation, such as poly(lactide-co-glycolide), polyanhydrides, and polyorthoesters, are also bio-adhesives. These polymers can be used to deliver polypeptide and protein drugs to the gastrointestinal tract. As the polymers degrade, they can expose carboxyl groups to enable them to adhere strongly to the gastrointestinal tract, so as to aid in the delivery of polypeptide and protein drugs.

[0143] Lipophilic Moieties

[0144] In one embodiment, the modifying moieties include one or more lipophilic moieties. The lipophilic moiety may be those well known by the skilled in the art, which include, but not limited to, alkyl, alkenyl, alkynyl, aryl, arylalkyl, alkylaryl, fatty acids, cholesteryl, lipophilic oligomers and polymers.

[0145] The hydrocarbyl can be a saturated or unsaturated, linear, branched, or cyclic hydrocarbon having one or more carbon atoms. In one embodiment, the hydrocarbyl has 1, 2, 3, 4, 5, 6, 7, 8, 9, 10, 11, 12, 13, 14, 15, 16, 17, 18, 19, 20, 21, 22, 23, 24, 25, 26, 27, 28, 29, 30 or more carbon atoms. The hydrocarbyl can either be unsubstituted or substituted with one or more substituents.

[0146] The lipophilic moiety may be a fatty acid, such as a natural or synthetic, saturated or unsaturated, linear or branched fatty acid. In one embodiment, the fatty acid has 2, 3, 4, 5, 6, 7, 8, 9, 10, 11, 12, 13, 14, 15, 16, 17, 18, 19, 20, 21, 22, 23, 24, or more carbon atoms.

[0147] Conjugation Strategies

[0148] The degree of conjugation of a protein with modifying moieties, selection of conjugation sites and selection of modifying moieties may be varied according to actual requirements, for example, to make the conjugate less susceptible to in vivo degradation, and thus has an increased plasma half-life. A conjugation site may include an amino acid residue such as lysine. In one embodiment, protein conjugates are mono-conjugates. In another embodiment, protein conjugates are multi-conjugates. In some embodiments, protein conjugates are a mixture of mono-conjugate, di-conjugates, tri-conjugates, tetra-conjugates and the like. The modifying moieties may be the same, or different from one another. When a protein conjugate has a plurality of modifying moieties, it may be preferable to couple one or more of the modifying moieties to a fusion protein with hydrolyzable bonds and couple other modifying moieties to the fusion protein with non-hydrolyzable bonds. Alternatively, all of the bonds coupling the modifying moieties to a fusion protein may be hydrolyzable but have varying hydrolysis rates in vivo.

[0149] An ideal conjugation strategy is one in which a conjugate is endowed with some or all biological activities of the original protein. The preferred conjugation sites of an insulin receptor binding polypeptide includes B1 (N-terminus) of a double chain insulin analogue, the amino group on the side chain of a lysine or the mercapto group on the side chain of a cysteine originally present or introduced after substitution or insertion at the C-terminus of B chain, the amino group on the side chain of a lysine or the mercapto group on the side chain of a cysteine introduced after substitution or insertion at the C-terminus of A chain, the amino group on the side chain of a lysine or the mercapto group on the side chain of a cysteine originally present or introduced after substitution or insertion at the N- or C-terminus of a single chain insulin analogue. A B1 mono-conjugate and a di-conjugate of the B chain are most commonly used. Furthermore, other conjugation sites can be created by embedding a natural or non-natural amino acid having an amino or mercapto group into the C peptide linker, or the A chain, the B chain of a single chain insulin analogue. The conjugation sites used most commonly in an interleukin-1 receptor binding polypeptide include the mercapto group on the side chain of a cysteine at positions 84 and 116 or the amino group at the N-terminus. The conjugation sites used most commonly in a GLP-1 analogue include the amino group on the side chain of a lysine or the mercapto group on the side chain of a cysteine at positions 10, 20, and 28 starting from N-terminus of GLP-1 (7-37) —OH or GLP-1 (7-36) —NH₂, originally present or introduced after substitution or insertion, or the amino group on the side chain of a lysine or the mercapto group on the side chain of a cysteine introduced after substitution or insertion at the C-terminus. The conjugation sites used most commonly in an Exendin-4 analogue include the amino group on the side chain of a lysine or the mercapto group on the side chain of a cysteine at positions 12, 20, 27, 28 and 32 starting from N-terminus of Exendin-4, originally present or introduced after substitution or insertion, or the amino group on the side chain of a lysine or the mercapto group on the side chain of a cysteine substituted or inserted at the C-terminus.

[0150] A modifying moiety may be coupled to a protein with a hydrolyzable bond (e.g., an ester, carbonate or hydrolyzable carbamate bond). Use of a hydrolyzable bond will allow a protein conjugate to act as a prodrug. For example, when a modifying moiety conjugation site is in a binding region of a protein to the receptor, the conjugate of the protein and modifying moiety lacks activity. The active protein is released as one or more modifying moieties are detached from the conjugate. Use of a hydrolyzable bond can also provide a delayed-release or controlled-release effect.

[0151] In one example, a protein is coupled to a modifying moiety by a non-hydrolyzable bond (such as amide bond and ether bond). And the non-hydrolyzable bond may contribute to the prolongation of circulation time for protein conjugate in the plasma if necessary.

[0152] A protein, protein analogue, or protein derivative may be coupled to the modifying moiety by a various nucleophilic functional groups, including, but not limited to, nucleophilic hydroxyl or amino. Nucleophilic hydroxyl may be found, for example, in serine, threonine, or tyrosine, and nucleophilic amino may be found, for example, in histidine, Lysine or at the N-terminus of the A or B chains of insulin or insulin analogue. A protein may be coupled to a modifying moiety by a free —SH group, e.g., by forming a thioester, thioether or sulfonate bond.

[0153] One of the reasons for short circulation time of small molecular weight polypeptides or proteins in the plasma is renal clearance. Increasing the molecular weight of polypeptides or proteins to the critical point for renal clearance of over 40,000 daltons will significantly reduce the renal clearance rate and prolong duration of action of the polypeptides. One common approach is to conjugate a protein or polypeptide to a natural or synthetic large molecule via a hydrolysable or non-hydrolysable bond. Biomacromolecules include albumin, polysaccharides (such as glucan), and antibody (such as IgG) etc. Albumin and IgG account for 90% of plasma proteins and have weeks of in vivo circulation time. Polypeptides conjugated to albumin or IgG Fc display a markedly longer in vivo circulation time. For example, etanercept is a product of soluble TNF2 receptor bound to the IgG1 Fc, such a receptor dimer with a 150 kDa molecular weight is an effective antiinflammatory agent which is administered twice weekly (t_{1/2}=102 hours). Recently approved romiplostim for stimulation of platelet production is another example of IgG fusion protein.

[0154] The albumin may be human albumin (HSA), an analogue of human albumin or a portion of human albumin. Human albumin comprises 585 of amino acid residues with a molecular weight of 66500. EP322,094 provides shorter sequences of human albumin, including HAS (1-373), HAS (1-388), HAS (1-389), HAS (1-369), HAS (1-419), and the fragment between amino acid positions 1-369 and 1-419. The sequences provided in EP399666 include HAS (1-177), HAS (1-200), and the fragment between HSA (1-177) and HAS (1-200). The Fc portion of an immunoglobulin may be the Fc portion of a human immunoglobulin, an analogue of the Fc portion of human immunoglobulin, a fragment of the Fc portion of human immunoglobulin, etc. Fc may comprise the hinge-region, C_{H2}, C_{H3} up to the C-terminus. A major reason for the Fc fusion protein to extend the in vivo circulation time is that the Fc is able to bind to FcRn. FcRn distributes over the surface of endothelial cells, binds to IgG in a pH-dependent manner, and protects IgG from degradation. Variations at the interface between CH₂ and CH₃ may extend the half-time of IgG (Hinton P R, et al., 2004. Engineered human IgG antibodies with longer serum half-lives in primates. J Biol Chem. 279(8):6213-6; Vaccaro C., et al., 2005. Engineering the Fc region of immunoglobulin G to modulate in vivo antibody levels. Nat Biotechnol. 23(10):1283-8). As 70% of albumins in the blood vessel are mercaptalbumin, the mercapto group on the side chain of the cysteine-34 is the most active mercapto group in the blood plasma. The inventive protein, analogue, or derivative thereof may be reacted with it by a linking group with an active functional group at one of its ends such as maleimide, etc., to generate a fusion protein-albumin conjugate. In one embodiment, the N- or C-terminus of the protein in the present invention can be linked to the N- or C-terminus of the albumin or immunoglobulin Fc. This linking strategy enables the circulation time of small molecule weight compound to reach the half-time of plasma protein to which it binds, but at the price of possible decrease in the receptor binding affinity. One of the solutions to the above is insertion of a spacer group between the polypeptide (or the protein) and the modifying group. The spacer group, such as β-alanine, γ-aminobutyric acid, γ-glutamic acid or polyethylene glycol, may be used between an amino group of the polypeptide/protein and a modifying group. Palmitic acid group of Liraglutide is linked to the side chain of a lysine through a spacer group. An additional solution is that the modifying group is linked to the polypeptide/protein through a “reversible” linking group.

[0155] The Fusion Protein/Dimeric Protein/Cross-Linking Protein

[0156] The fusion protein, dimeric protein or cross-linking protein referred in the present invention is a product obtained by linking a GLP-1 receptor binding polypeptide, a GIP receptor binding polypeptide or an insulin receptor binding polypeptide to an interleukin-1 receptor antagonistic protein. The two portions of the polypeptide/protein can be directly linked and can also be linked through a linking group (or a spacer group). The fusion protein/dimeric protein/cross-linking protein can have a biological activity for an interleukin-1 receptor amounting to 1%, 5%, 10%, 20%, 30%, 40%, 50%, 60%, 70%, 80%, 90%, 100%, or higher of the biological activity of IL-RA, while as to the other portion, the GLP-1 receptor binding polypeptide, the GIP receptor binding polypeptide, or the insulin receptor binding polypeptide has a biological activity for a GLP-1 receptor, a GIP receptor, or an insulin receptor, respectively amounting to 0.1%, 0.2%, 0.3%, 0.4%, 0.5%, 1%, 5%, 10%, 20%, 30%, 40%, 50%, 60%, 70%, 80%, 90%, 100% or higher of the biological activity of GLP-1 (7-36) —NH₂, GIP (1-42), or the human insulin, respectively.

[0157] The fusion protein, dimeric protein, cross-linking protein and derivatives thereof in the present invention may be prepared and produced by using bioengineering technologies. For convenience of expressing and producing the protein, methionine can be added at the N-terminus of the sequences of the individual proteins of the present invention according to the requirements.

[0158] The linking group (or the spacer group) may be chemically synthesized molecules, such as long-chain fatty acids or polyethylene glycol, and may also be a natural or non-natural amino acid (e.g., lysine, glutamic acid, aspartic acid), a short peptide (e.g., β-alanine-β-alanine), a protein, or a long chain formed by one or more optional long-chain fatty acids, polyethylene glycol, amino acids, short peptides, etc linked together through covalent bonds, or any structure connecting two active polypeptides/proteins through a covalent bond, or absent.

[0159] Through a chemical reaction, the linking group may connect two polypeptides/proteins originally not attached (one is an interleukin-1 receptor antagonistic protein, the other is a GLP-1 receptor binding polypeptide, a GIP receptor binding polypeptide, or an insulin receptor binding polypeptide). In one embodiment, the linking group may have two activating groups (e.g., N-hydroxyl succinimide (NHS ester) or maleimide), each of which is reacted with the amino or mercapto group on the interleukin-1 receptor antagonistic protein and the GLP-1 receptor binding polypeptide (or the GIP receptor binding polypeptide or the insulin receptor binding polypeptide), linking the three components as a whole. In one embodiment, the linking group may have an activating group (e.g., NHS ester, maleimide, iodoacetyl, or vinylsulfone) and a functional group (e.g., an amino or mercapto group), each of which is reacted respectively with a functional group (e.g., an amino or mercapto group) and an activating group (e.g., NHS ester, maleimide, iodoacetyl, or vinylsulfone) on the interleukin-1 receptor antagonistic protein and the GLP-1 receptor binding polypeptide (or the GIP receptor binding polypeptide or the insulin receptor binding polypeptide), linking the three components as a whole. In another embodiment, the linking group may have two functional groups (e.g., an amino or mercapto group), each of which is reacted with the activating groups (e.g., NHS, maleimide, iodoacetyl, or vinylsulfone) on the interleukin-1 receptor antagonistic protein and the GLP-1 receptor binding polypeptide (or the GIP receptor binding polypeptide or the insulin receptor binding polypeptide), linking the three components as a whole. The positions of activating group and functional group needs to be determined according to the requirement for a particular reaction.

[0160] If the linking group is already linked to a biologically active polypeptide (e.g., an interleukin-1 receptor antagonistic protein) and is to be linked through a chemical reaction to another biologically active polypeptide originally not attached, the reaction mode is similar to the above. For connection of the linking group already linked to a polypeptide to another polypeptide originally not attached, one entity is required to have a functional group (e.g., an amino or mercapto group) and the other is required to have a reactive group (e.g., NHS ester, maleimide, iodoacetyl, or vinylsulfone). As for location of the reactive group and the functional group in the linking group or the polypeptide, it needs to be determined according to the requirement from a particular reaction.

[0161] In one particular embodiment, the linking group (or the spacer group) comprises one or more lysine or cysteine residues, of which the amino or mercapto groups on the side chains are used to be reacted with the modifying group. In one embodiment, the GLP-1 receptor binding polypeptide, the GIP receptor binding polypeptide or the insulin receptor binding polypeptide is linked to the interleukin-1 receptor antagonistic protein through a short peptide, forming a single-chain fusion protein. The general formula for the short peptide is (GlyGlyGlyGlySer)ₙ (SEQ ID NO:436), wherein n is a 0, 1, 2, 3, 4, 5, or 6.

[0162] 1. the fusion protein consisting of the GLP-1 receptor binding polypeptide and the interleukin-1 receptor antagonistic protein

[0163] In one embodiment, the sequence of the GLP-1 receptor binding polypeptide on the basis of the human GLP-1 is

(SEQ ID NO: 231)
X_{G1}X_{G2}X_{G3}GX_{G5}X_{G6}TSDX_{G10}SX_{G12}YLEX_{G16}X_{G17}X_{G18}AX_{G20}
X_{G21}FIX_{G24}X_{G25}LX_{G27}X_{G28}X_{G29}X_{G30}X_{G31},

wherein

[0164] X_{G1} is a histidine, D-histidine, deamino-histidine, β-hydroxyl-histidine, homohistidine, α-fluoromethyl-histidine, α-methyl-histidine, N-methyl-histidine, N^{α}-acetyl-histidine, α-methyl-histidine, 2-pyridinyl-alanine, 3-pyridinyl-alanine, 4-pyridinyl-alanine, imidazopropionyl; X_{G2} is a 2-methylalanine (Aib), glycine, D-serine, serine, threonine, leucine, isoleucine, alanine, valine, aminocyclopropanecarboxylic acid, aminocyclobutanecarboxylic acid, aminocyclopentanecarboxylic acid, aminocyclohexanecarboxylic acid, aminocycloheptanecarboxylic acid, or aminocyclooctanecarboxylic acid; X_{G3} is a glutamic acid, aspartic acid, or glutamine; X_{G5} is a threonine, aspartic acid, glutamic acid, arginine, alanine, lysine, or histidine; X_{G6} is a phenylalanine, tyrosine, tryptophan, or histidine; X_{G10} is a valine, tyrosine, phenylalanine, tryptophan, histidine, leucine, isoleucine, serine, threonine, aspartic acid, glutamic acid, alanine, lysine, arginine, cysteine, general formula 1, or general formula 2; X_{G12} is a serine, isoleucine, lysine, arginine, cysteine, general formula 1, or general formula 2; X_{G16} is a glycine, serine, histidine, glutamic acid, aspartic acid, glutamine, asparagine, lysine, arginine, homoglutamic acid, cysteine, homocysteine, or cysteic acid; X_{G17} is a glutamine, arginine, isoleucine, glutamic acid, aspartic acid, histidine, lysine, cysteine, general formula 1, or general formula 2; X_{G18} is an alanine, arginine, histidine, glutamic acid, or lysine; X_{G20} is lysine, arginine, aspartic acid, glutamic acid, glutamine, histidine, 2-methylalanine, cysteine, general formula 1, or general formula 2; X_{G21} is an aspartic acid, glutamic acid, leucine, alanine, lysine, cysteine, general formula 1, or general formula 2; X_{G24} is an alanine, glutamine, asparagine, glutamic acid, aspartic acid, serine, or histidine; X_{G25} is an alanine, tryptophan, phenylalanine, tyrosine, cysteine, lysine, general formula 1, or general formula 2; X_{G27} is a valine, leucine, lysine, arginine, alanine, glycine, cysteine, general formula 1, or general formula 2; X_{G28} is a lysine, arginine, aspartic acid, glutamic acid, alanine, asparagine, cysteine, general formula 1, or general formula 2; X_{G29} is a glycine, glutamine, threonine, serine, lysine, arginine, cysteine, general formula 1, or general formula 2; X_{G30} is an arginine, lysine, glycine, histidine, cysteine, general formula 1, or general formula 2; X_{G31} is a —NH₂, glycine, threonine, serine, aspartic acid, glutamic acid, tryptophan, tyrosine, phenylalanine, histidine, arginine, lysine, cysteine, a linking or spacer group, general formula 3, general formula 4 or a linking or spacer group+X_{G32}, in which X_{G32} is a lysine, cysteine, general formula 3, general formula 4 or absent; in one particular embodiment, X_{G31} is GPSSGAPPPS (SEQ ID NO:437) or PSSGAPPPS (SEQ ID NO:438), in which any one of the amino acid residues can be substituted or deleted or is a general formula 1, or general formula 2, or general formula 3, or general formula 4;

[0165] In the present invention, the structure of general formula 1 is

[chemical structure]

[0166] in which J is the structure of Lₙ-M_{L}, the structure of -W-X-Y-Z or a hydrogen atom;

[0167] M_{L}is a modifying group, including, but not limited to, -W-X-Y-Z, a fatty acid, polyethylene glycol, albumin, IgG Fc, glycosyl, etc;

[0168] Lₙ is a optional linking group, covalent linkage or absent; the optional linking group includes, but are not limited to, polyethylene glycol, a long chain fatty acid, a polypeptide, a natural or non-natural amino acid, or a long chain formed by linking one or more of polyethylene glycol molecules, fatty acids, polypeptides, amino acid molecules through covalent bonds. In one embodiment, Lₙ may be a —NH—(CH₂CH₂O)ₙ—CH₂—CO—, —NH—(CH₂)ₙ-CO—, —NH—(CH₂CH₂O)ₙ—(CH₂)ᵣ-CO—, n is an integer from 1 to 25, and r is an integer from 1 to 16. In one particular embodiment, Lₙ is a —NH—(CH₂CH₂O)₂—CH₂—CONH—(CH₂CH₂O)₂—CH₂—CO—. In one embodiment, Lₙ is a —NH—(CH₂)ₙ₁—O—(CH₂CH₂O)ₙ₂—(CH₂)ₙ₃-CO—, n1, n2, and n3 are each an integer from 1 to 18. In one embodiment, Lₙ is a —NH—(CH₂)ₙ₁—(OCH₂CH₂)ₙ₂-CO—, n1 and n2 are each an integer from 1 to 18. In the above embodiments, Lₙ is involved in formation of an amide bond between the carbon atom of the underlined carbonyl and an amino group on a side chain of a polypeptide, and the other terminus thereof forms a covalent linkage with M_{L}. In one embodiment, Lₙ is involved in formation of an amide bond between the carbon atom of the underlined carbonyl and an amino group on a side chain of a polypeptide, and the other terminus thereof forms a covalent linkage with -W-X-Y-Z.

[0169] In the present invention, the structure of -W-X-Y-Z is

[0170] W is an α-amino acid residue having a carboxyl group in the side chain, this residue forms, with one of its carboxyl groups, an amide group together with the α-amino group of the N-terminal amino acid residue of the polypeptide/protein, or together with the ε-amino group of a Lys residue present in the polypeptide/protein, or together with the amino group at the end of Lₙ;

[0171] Or W is a chain composed of two, three or four α-amino acids linked together via amide bonds, this chain linked via an amide bond is linked to the α-amino group of the N-terminal amino acid residue of the polypeptide or protein, or to the ε-amino group of a Lys residue present in the polypeptide or protein, or to the amino group at the end of Lₙ, the amino acid residues of W being selected from the group of amino acid residues having a neutral side chain and/or amino acid residues having a carboxyl group in the side chain so that W has at least one amino acid residue which has a carboxyl group in the side chain; or

[0172] Or W is a covalent bond from X to the α-amino group of the N-terminal amino acid residue of the polypeptide or protein, or to the ε-amino group of a Lys residue present in the polypeptide or protein, or to the amino group at the end of Lₙ;

[0173] X is —CO—, —CH(COOH)CO—, —N(CH₂COOH)CH₂CO—, —N(CH₂COOH)CH₂CON—(CH₂COOH)CH₂CO—, —N(CH₂CH₂COOH)CH₂CH₂CO—, —NHCH(COOH) (CH₂)₄NHCO—, —N(CH₂CH₂COOH)CH₂CH₂CON(CH₂CH₂COOH)CH₂CH₂CO—, —N(CH₂CH₂COOH)CH₂CO— or —N—(CH₂COOH)CH₂CH₂CO—, wherein

[0174] a) the above-mentioned X forms an amide bond with an amino group in W through the bond of the underlined carbonyl C, when W is an amino acid residue or a series of amino acid residues, or

[0175] b) the above-mentioned X forms an amide bond with the α-amino group of an amino acid residue at the N-terminus of the polypeptide/protein, or the ε-amino group of a Lys residue in the polypeptide/protein, or the amino group at the end of Lₙ through the bond of the underlined carbonyl C, when W is a covalent bond;

[0176] Y is —(CH₂)m, wherein m is an integer from 6 to 32;

[0177] or a divalent hydrocarbon chain comprising 1, 2 or 3 of —CH═CH-groups and multiple of —CH₂— groups, wherein the number of —CH₂— groups allows the total number of carbon atoms in the chain to reach a range of 10 to 32;

[0178] or a divalent hydrocarbon chain of the general formula —(CH₂)ᵥC₆H₄(CH₂)w-, wherein v and w are integers or one of them is zero so that the sum of v and w is in the range of 6 to 30; and

[0179] Z is —COOH; —CO-Asp; —CO-Glu; —CO-Gly; —CO-Sar; —CH(COOH)₂; —N(CH₂COOH)₂; —SO₃H; —PO₃H; or absent, provided that Z is not —COOH when W is a covalent bond and X is —CO—.

[0180] W in the side chain -W-X-Y-Z can be a covalent bond. Alternatively, W can be an α-amino acid residue having a carboxyl group in its side chain and comprising a total of from 4 to 10 carbon atoms. W also can be an α-amino acid residue encoded by a genetic code. For example, W can be selected from the group consisting of α-Asp, β-Asp, α-Glu, and γ-Glu. Further options for W are for example α-hGlu and δ-hGlu.

[0181] In a further embodiment, W is a chain composed of two α-amino acid residues of which one has from 4 to 10 carbon atoms and a carboxyl group in the side chain while the other has from 2 to 11 carbon atoms but no free carboxyl group. The α-amino acid residue with no free carboxyl group can be a neutral, encodable α-amino acid residue. Examples of W according to this embodiment are: α-Asp-Gly; Gly-α-Asp; β-Asp-Gly; Gly-β-Asp; α-Glu-Gly; Gly-α-Glu; γ-Glu-Gly; Gly-γ-Glu; α-hGlu-Gly; Gly-α-hGlu; δ-hGlu-Gly; and Gly-δ-hGlu.

[0182] In a further embodiment, W is a chain composed of two α-amino acid residues, independently having from 4 to 10 carbon atoms, and both having a carboxyl group in the side chain. One of these α-amino acid residues or both of them can be encodable α-amino acid residues. Examples of W according to this embodiment are: α-Asp-α-Asp; α-Asp-α-Glu; α-Asp-α-hGlu; α-Asp-β-Asp; α-Asp-γ-Glu; α-Asp-δ-hGlu; β-Asp-α-Asp; β-Asp-α-Glu; β-Asp-α-hGlu; β-Asp-β-Asp; β-Asp-γ-Glu; β-Asp-δ-hGlu; α-Glu-α-Asp; α-Glu-α-Glu; α-Glu-α-hGlu; α-Glu-β-Asp; α-Glu-γ-Glu; α-Glu-δ-hGlu; γ-Glu-α-Asp; γ-Glu-α-Glu; γ-Glu-α-hGlu; γ-Glu-β-Asp; γ-Glu-γ-Glu; γ-Glu-δ-hGlu; α-hGlu-α-Asp; α-hGlu-α-Glu; α-hGlu-α-hGlu; α-hGlu-β-Asp; α-hGlu-γ-Glu; α-hGlu-δ-hGlu; δ-hGlu-α-Asp; δ-hGlu-α-Glu; δ-hGlu-α-hGlu; δ-hGlu-β-Asp; δ-hGlu-γ-Glu; and δ-hGlu-δ-hGlu.

[0183] In a further embodiment, W is a chain composed of three α-amino acid residues, independently having from 4 to 10 carbon atoms, the amino acid residues of the chain being selected from the group of residues having a neutral side chain and residues having a carboxyl group in the side chain so that the chain has at least one residue which has a carboxyl group in the side chain. In one embodiment, the amino acid residues are encodable residues.

[0184] In a further embodiment, W is a chain composed of four α-amino acid residues, independently having from 4 to 10 carbon atoms, the amino acid residues of the chain being selected from the group of residues having a neutral side chain and residues having a carboxyl group in the side chain so that the chain has at least one residue which has a carboxyl group in the side chain. In one embodiment, the amino acid residues are encodable residues.

[0185] In one embodiment, W in -W-X-Y-Z can be connected to the ε-amino group of the Lys residue via a urea derivative.

[0186] The X of the side chain -W-X-Y-Z can be a group of the general formula —CO—, which via a bond from the underlined carbonyl carbon, forms an amide bond with an amino group in W; or when W is a covalent bond, via a bond from the underlined carbonyl carbon, X forms an amide bond with the N-terminal α-amino group in the polypeptide/protein, or with the ε-amino group of a Lys residue present in the polypeptide/protein, or with amino group at the end of Lₙ.

[0187] In a further embodiment, the X of the side chain -W-X-Y-Z can be a group of the general formula —CH(COOH)CO—, which via a bond from the underlined carbonyl carbon, forms an amide bond with an amino group in W or; or when W is a covalent bond, via a bond from the underlined carbonyl carbon, X forms an amide bond with the N-terminal α-amino group in the polypeptide/protein, or with the ε-amino group of a Lys residue present in the polypeptide/protein, or with amino group at the end of Lₙ.

[0188] In a further embodiment, the X of the side chain -W-X-Y-Z can be a group of the general formula —N(CH₂COOH)CH₂CO—, which via a bond from the underlined carbonyl carbon, forms an amide bond with an amino group in W or; or when W is a covalent bond, via a bond from the underlined carbonyl carbon, X forms an amide bond with the N-terminal α-amino group in the polypeptide/protein, or with the ε-amino group of a Lys residue present in the polypeptide/protein, or with amino group at the end of Lₙ.

[0189] In a further embodiment, the X of the side chain -W-X-Y-Z can be a group of the general formula —N(CH₂CH₂COOH)CH₂CO—, which via a bond from the underlined carbonyl carbon, forms an amide bond with an amino group in W or; or when W is a covalent bond, via a bond from the underlined carbonyl carbon, X forms an amide bond with the N-terminal α-amino group in the polypeptide/protein, or with the ε-amino group of a Lys residue present in the polypeptide/protein, or with amino group at the end of Lₙ.

[0190] In a further embodiment, the X of the side chain -W-X-Y-Z can be a group of the general formula —N(CH₂COOH)CH₂CH₂CO—, which via a bond from the underlined carbonyl carbon, forms an amide bond with an amino group in W or; or when W is a covalent bond, via a bond from the underlined carbonyl carbon, X forms an amide bond with the N-terminal α-amino group in the polypeptide/protein, or with the ε-amino group of a Lys residue present in the polypeptide/protein, or with amino group at the end of Lₙ.

[0191] In a further embodiment, the X of the side chain -W-X-Y-Z can be a group of the general formula —N(CH₂COOH) CH₂CON(CH₂COOH)CH₂CO—, which via a bond from the underlined carbonyl carbon, forms an amide bond with an amino group in W or; or when W is a covalent bond, via a bond from the underlined carbonyl carbon, X forms an amide bond with the N-terminal α-amino group in the polypeptide/protein, or with the ε-amino group of a Lys residue present in the polypeptide/protein, or with amino group at the end of Lₙ.

[0192] In a further embodiment, the X of the side chain -W-X-Y-Z can be a group of the general formula —N(CH₂CH₂COOH)CH₂CH₂CO—, which via a bond from the underlined carbonyl carbon, forms an amide bond with an amino group in W or; or when W is a covalent bond, via a bond from the underlined carbonyl carbon, X forms an amide bond with the N-terminal α-amino group in the polypeptide/protein, or with the ε-amino group of a Lys residue present in the polypeptide/protein, or with amino group at the end of Lₙ.

[0193] In a further embodiment, the X of the side chain -W-X-Y-Z can be a group of the general formula —N(CH₂CH₂COOH) CH₂CH₂CO N(CH₂CH₂COOH) CH₂CH₂CO—, which via a bond from the underlined carbonyl carbon, forms an amide bond with an amino group in W or; or when W is a covalent bond, via a bond from the underlined carbonyl carbon, X forms an amide bond with the N-terminal α-amino group in the polypeptide/protein, or with the ε-amino group of a Lys residue present in the polypeptide/protein, or with amino group at the end of Lₙ.

[0194] The Y of the side chain -W-X-Y-Z can be a group of the general formula —(CH₂)ₘ—, where m is an integer in the range from 6 to 32, from 8 to 20, from 12 to 20, or from 12-16.

[0195] In another embodiment, Y of the side chain -W-X-Y-Z is a divalent hydrocarbon chain comprising 1, 2 or 3 —CH═CH-groups and a number of —CH₂— groups sufficient to give a total number of carbon atoms in the chain in the range of from 6 to 32, from 10 to 32, from 12 to 20, or from 12-16.

[0196] In another embodiment, Y of the side chain -W-X-Y-Z is a divalent hydrocarbon chain of the general formula —(CH₂)ᵥC₆H₄(CH₂)_{w}—, wherein v and w are integers or one of them is zero so that the sum of v and w is in the range of from 6 to 30, from 10 to 20, or from 12-16.

[0197] In one embodiment, the Z of the side chain -W-X-Y-Z is —COOH, provided that when W is a covalent bond and X is —CO—, then Z is not —COOH.

[0198] In another embodiment, the Z of the side chain -W-X-Y-Z is —CO-Asp, —CO-Glu, —CO-Gly, —CO-Sar, —CH(COOH)₂, —N(CH₂COOH)₂, —SO₃H or —PO₃H;

[0199] In a further embodiment, W of the side chain -W-X-Y-Z is selected from the group consisting of α-Asp, β-Asp, α-Glu, and γ-Glu; X is —CO— or —CH(COOH)CO; Y is —(CH₂)ₘ—, where m is an integer in the range of 12-18 and Z is —COOH, —CH(COOH)₂ or absent;

[0200] In a further embodiment, W of the side chain -W-X-Y-Z is selected from the group consisting of α-Asp, β-Asp, α-Glu or γ-Glu; —X—Y—Z is —CO(CH₂)ₙCH₃, which via a bond from the underlined carbonyl carbon, forms an amide bond with an amino group in W; n is an integer in the range of 10-20.

[0201] In a further embodiment, W of the side chain -W-X-Y-Z is selected from the group consisting of α-Asp, β-Asp, α-Glu or γ-Glu; —X—Y—Z is —CO(CH₂)₁₂CH₃.

[0202] In a further embodiment, W of the side chain -W-X-Y-Z is selected from the group consisting of α-Asp, β-Asp, α-Glu or γ-Glu; —X—Y—Z is —CO(CH₂)₁₄CH₃.

[0203] In a further embodiment, W of the side chain -W-X-Y-Z is selected from the group consisting of α-Asp, β-Asp, α-Glu or γ-Glu; —X—Y—Z is —CO(CH₂)₁₆CH₃.

[0204] In the present invention, the structure of general formula 2 is

[chemical structure]

[0205] wherein

[0206] the basic structure of O_{L} is Mᵣ-Lᵣ-NH-J, Mᵣ-Lᵣ-Zᵣ, Mᵣ-Lᵣ-Mᵣ, Mᵣ-Lᵣ-M_{L}, or a hydrogen atom;

[0207] J and M_{L} are defined as the above in the present invention;

[0208] Mᵣ is a functional group capable of reacting with the mercapto group to form a covalent linkage, for example, maleimide, vinylsulfone, iodoacetyl, etc.; Lᵣ is an alternative linking group, covalent linkage or absent, including, but not limited to, polyethylene glycol, a long chain fatty acid, or a long chain formed by linking together one or more polyethylene glycol molecules and long chain fatty acid molecules through covalent bonds.

[0209] The two Mᵣ at ends of Lᵣ in Mᵣ-Lᵣ-Mᵣ can be identical or different; a covalent linkage is formed after Mᵣ at one end of Mᵣ-Lᵣ-Mᵣ is reacted with an IL-1ra.

[0210] When M_{L} is an immunoglobulin or IgG Fc, one end of the linking group is Mᵣ and linked to the IL-1ra while the other end is an aldehyde group which is reacted with the amino group on an immunoglobulin or the Fc of an IgG through reductive amination to form a covalent linkage. M_{L} includes part of or the whole of constant regions of the heavy or light chain of a human immunoglobulin. The immunoglobulin portion may include all constant regions except the first domain in the heavy chain constant regions of a human immunoglobulin (e.g., IgG, IgA, IgM, or IgE). Any amino acid residue in each of the immunoglobulin portions can be deleted or substituted with one or more of amino acid residues, or can be inserted with one or more of amino acid residues.

[0211] O_{L} includes, but is not limited to the following structure:

[chemical structure]

[0212] —CH₂—CONH—(CH₂)ₙ—NH-J, a thioether bond is formed by a bond from the underlined carbon atom and the sulphur atom of a cysteine;

[0213] —CH₂—CONH—(CH₂)ₙ—Z₁, a thioether bond is formed by a bond from the underlined carbon atom and the sulphur atom of a cysteine;

[0214] —CH₂—CONH—(CH₂CH₂O)ₙ—(CH₂)ₘ—NH-J, a thioether bond is formed by a bond from the underlined carbon atom and the sulphur atom of a cysteine;

[0215] —CH₂—CONH—(CH₂CH₂O)ₙ—(CH₂)ₘ—Z₁, a thioether bond is formed by a bond from the underlined carbon atom and the sulphur atom of a cysteine;

[0216] —CH₂—CH₂—SO₂—(CH₂CH₂O)ₙ—(CH₂)ₘ—NH-J, a thioether bond is formed by a bond from the underlined carbon atom and the sulphur atom of a cysteine;

[0217] —CH₂—CH₂—SO₂—(CH₂CH₂O)ₙ—(CH₂)ₘ—Z₁, a thioether bond is formed by a bond from the underlined carbon atom and the sulphur atom of a cysteine;
[0218] in which Z₁ is —COOH, —CO-Asp, —CO-Glu, —CO-Gly, —CO-Sar, —CH(COOH)₂, —N(CH₂COOH)₂, SO₃H, —PO₃H or absent; m, n, and p are each an integer from 1 to 25.

[0219] In the present invention, the structure of general formula 3 is

[chemical structure]

[0220] wherein J and O_{L} are defined as the above and R₁ is —OH or —NH₂;

[0221] In the present invention, the structure of general formula 4 is

[chemical structure]

[0222] wherein R₁ and O_{L} are defined as the above.

[0223] In one embodiment, the sequence of the GLP-1 receptor binding polypeptide is

(SEQ ID NO: 232)
HX_{G2}EGTFTSDX_{G10}SSYLEX_{G16}QAAX_{G20}EFIAWLVX_{G28}GRX_{G31},

in which each of the variables is defined as the above.

[0224] In one embodiment, the sequence of the GLP-1 receptor binding polypeptide on the basis of exendin-4 is

(SEQ ID NO: 233)
X_{E1}X_{E2}X_{E3}GTX_{E6}TSDX_{E10}SX_{E12}X_{E13}X_{E14}EX_{E16}X_{E17}AX_{E19}
X_{E20}X_{E21}FX_{E23}X_{E24}X_{E25}LX_{E27}X_{E28}X_{E29}X_{E30}X_{E31}X_{E32}X_{E33}
X_{E34}X_{E35}X_{E36}X_{E37}X_{E38}X_{E39},

wherein

[0225] X_{E1} is a histidine, D-histidine, deamino-histidine, β-hydroxyl-histidine, homohistidine, α-fluoromethyl-histidine, α-methyl-histidine, N-methyl-histidine, N^{α}-acetyl-histidine, α-methyl-histidine, 2-pyridinyl-alanine, 3-pyridinyl-alanine, 4-pyridinyl-alanine, imidazopropionyl, arginine, or tyrosine; X_{E2} is a glycine, alanine, 2-methylalanine, D-serine, serine, threonine, leucine, isoleucine, valine, aminocyclopropanecarboxylic acid, aminocyclobutanecarboxylic acid, aminocyclopentanecarboxylic acid, aminocyclohexanecarboxylic acid, aminocycloheptanecarboxylic acid, or aminocyclooctanecarboxylic acid; X_{E3} is an aspartic acid, glutamic acid, or glutamine; X_{E6} is a phenylalanine, alanine, tyrosine, or naphthylalanine; X_{E10} is a leucine, isoleucine, tyrosine, valine, alanine, lysine, cysteine, general formula 1, general formula 2, or pentaglycine; X_{E12} is a lysine, cysteine, arginine, serine, isoleucine, or general formula 1, or general formula 2; X_{E13} is a glutamine, alanine, or tyrosine; X_{E14} is a methionine, leucine, norleucine, isoleucine, alanine, valine, or general formula 1, or general formula 2; X_{E16} is a glutamic acid, aspartic acid, serine, glycine, lysine, or arginine; X_{E17} is a glutamic acid, glutamine, arginine, or isoleucine; X_{E19} is a valine, alanine, or glutamine; X_{E20} is a lysine, glutamine, cysteine, arginine, general formula 1, or general formula 2; X_{E21} is a leucine, glutamic acid, or aspartic acid; X_{E23} is an isoleucine, leucine, valine, pentaglycine; X_{E24} is an alanine, glutamic acid, aspartic acid, asparagine, or glutamine; X_{E25} is an alanine, tryptophan, phenylalanine, tyrosine, cysteine, lysine, naphthylalanine, general formula 1, or general formula 2; X_{E27} is a lysine, cysteine, asparagine, leucine, valine, arginine, general formula 1, or general formula 2; X_{E28} is an asparagine, lysine, cysteine, arginine, alanine, general formula 1, or general formula 2; X_{E29} is —NH₂, glycine, glutamine, threonine, lysine, cysteine, or absent; X_{E30} is —NH₂, glycine, tyrosine, arginine, lysine, cysteine, general formula 1, general formula 2, or absent; X_{E31} is —NH₂, glycine, proline, homoproline, thioproline, N-alkyl alanine, or absent; X_{E32} is a serine, lysine, cysteine, deletion, general formula 1, or general formula 2; X_{E33} is a serine, lysine, cysteine, general formula 1, general formula 2, or absent; X_{E34} is a glycine, absent, general formula 1, or general formula 2; X_{E35} is an alanine, lysine, cysteine, general formula 1, general formula 2, or absent; X_{E36} is a proline, homoproline, thioproline, N-alkyl alanine, or absent; X_{E37} is a proline, homoproline, thioproline, N-alkyl alanine, or absent; X_{E38} is a proline, homoproline, thioproline, N-alkylalanine, or absent; X_{E39} is a serine, serine-NH₂, cysteine, cysteine-NH₂, lysine, lysine-NH₂, or absent, or is a linking or spacer group +X_{E40}, wherein X_{E40} is a lysine, cysteine, general formula 3, or general formula 4.

[0226] In one embodiment, the sequence of the GLP-1 receptor binding polypeptide on the basis of exendin-4 is

(SEQ ID NO: 234)
X_{E1}GEGTFTSDLSX_{E12}QX_{E14}EEEAVX_{E20}LFIEWLX_{E27}X_{E28}X_{E29}
X_{E30}X_{E31}X_{E32}X_{E33}X_{E34}X_{E35}X_{E36}X_{E37}X_{E38}X_{E39},

wherein each of the variables is defined as the above.

[0227] In one embodiment, compared with the wild-type sequence, the amino acid sequence of an exendin-4 analogue have one or more amino acid residues substituted with a cysteine or lysine residue, for example, the C-terminal, the arginine at position 20, the tryptophan at position 25, the glycine at position 30, the alanine at position 35, and the serine at position 39 or the residues at other sites can be substituted with a cysteine or lysine residue.

[0228] From the above description, it can be seen that the GLP-1 receptor binding polypeptide and the interleukin-1 receptor antagonistic protein are able to protect P cells in the pancreas islet by similar or distinct mechanisms, thereby treating diabetes. Accordingly, the fusion protein, dimeric protein, cross-linking protein formed by connecting the two polypeptides may attain a therapeutic effect more excellent than that with either of the polypeptides alone, due to the synergism of the two polypeptides. Furthermore, one of the organs in which the GLP-1 receptors are mainly distributed is the pancreatic islet. The GLP-1 receptor binding polypeptide can serve as a guider for the fusion protein and enrich the interleukin-1 receptor antagonistic protein within and around the pancreatic islet, more effectively exerting actions such as anti-inflammation, etc.

[0229] The GLP-1 receptor binding polypeptide is linked to the interleukin-1 receptor antagonistic protein in various linkages through an alternative linking group (or spacer group).

[0230] (1) GLP-1 receptor binding polypeptide—linking group or spacer group—the interleukin-1 receptor antagonistic protein fusion protein.

[0231] In one embodiment, the GLP-1 receptor binding polypeptide and the interleukin-1 receptor antagonistic protein form a single chain compound via a linking group, of which the structure is (from left to right corresponding to the amino acid sequence from N-terminus to C-terminus): the GLP-1 receptor binding polypeptide—linking group (or spacer group)-interleukin-1 receptor antagonistic protein; or the interleukin-1 receptor antagonistic protein-linking group (or spacer group)—the GLP-1 receptor binding polypeptide.

[0232] In one embodiment, the sequence of the fusion protein on the basis of exendin-4 and the interleukin-1 receptor antagonistic protein is

(SEQ ID NO: 235)
X_{E1}X_{E2}X_{E3}GTX_{E6}TSDX_{E10}SX_{E12}X_{E13}X_{E14}EX_{E16}X_{E17}AX_{E19}
X_{E20}X_{E21}FX_{E23}X_{E24}X_{E25}LX_{E27}X_{E28}X_{E29}X_{E30}X_{E31}X_{E32}X_{E33}
X_{E34}X_{E35}X_{E36}X_{E37}X_{E38}X_{E39}-Lⱼ-X_{IL0}RPSGRKSSKMQAFRIWDV
NQKTFYLRNNQLVAGYLQGPNVNLEEKIDVVPIEPHALFLGIHGGKM
X_{IL66}LSX_{IL69}VKSGDETRLQLEAVX_{IL84}ITDLSENRKQDKRFAFIRS
DSGPTTSFESAAX_{IL116}PGWFLX_{IL122}TAMEADQPVSLTNMPDEGVMV
TKFYFQEDE,

wherein each of the variables is defined as the above.

[0233] In one embodiment, the sequence of the fusion protein on the basis of exendin-4 and the interleukin-1 receptor antagonistic protein is

(SEQ ID NO: 236)
X_{E1}X_{E2}EGTFTSDX_{E10}SX_{E12}QX_{E14}EEEAVX_{E20}LFIEWLX_{E27}X_{E28}
X_{E29}X_{E30}X_{E31}X_{E32}X_{E33}X_{E34}X_{E35}X_{E36}X_{E37}X_{E38}X_{E39}-Lⱼ-
X_{IL0}RPSGRKSSKNIQAFRIWDVNQKTFYLRNNQLVAGYLQGPNVNLEEK
IDVVPIEPHALFLGIHGGKNIX_{IL66}LSX_{IL69}VKSGDETRLQLEAV
X_{IL84}ITDLSENRKQDKRFAFIRSDSGPTTSFESAAX_{IL116}PGWFL
X_{IL122}TAMEADQPVSLTNMPDEGVMVTKFYFQEDE,

wherein each of the variables is defined as the above.

[0234] In one embodiment, the sequence of the fusion protein on the basis of exendin-4 and the interleukin-1 receptor antagonistic protein is

(SEQ ID NO: 237)
HX_{E2}EGTFTSDX_{E10}SX_{E12}QX_{E14}EEEAVX_{E20}LFIEWLX_{E27}X_{E28}
X_{E29}X_{E30}(PX_{E32}X_{E33}GX_{E35}PPPX_{E39})ₜ₂-Lⱼ-X_{IL0}RPSGRKSSK
MQAFRIWDVNQKTFYLRNNQLVAGYLQGPNVNLEEKIDVVPIEPHALFLG
IHGGKMCLSCVKSGDETRLQLEAVX_{IL84}ITDLSENRKQDKRFAFIRSDS
GPTTSFESAAX_{IL116}PGWFLCTAMEADQPVSLTNMPDEGVMVTKFYFQE
DE,

wherein t2 is 0 or 1 and other variables are defined as the above.

[0235] In one embodiment, the sequence of the fusion protein on the basis of exendin-4 and the interleukin-1 receptor antagonistic protein is

(SEQ ID NO: 238)
HX_{E2}EGTFTSDX_{E10}SX_{E12}QX_{E14}EEEAVX_{E20}LFIEWLX_{E27}X_{E28}
X_{E29}X_{E30}(PX_{E32}X_{E33}GX_{E35}PPPX_{E39})ₜ₂-(GGGGS)ₘ-X_{L}-
(GGGGS)ₙ-X_{IL0}RPSGRKSSKNIQAFRIWDVNQKTFYLRNNQLVAGYLQ
GPNVNLEEKIDVVPIEPHALFLGIHGGKMCLSCVKSGDETRLQLEAV
X_{IL84}ITDLSENRKQDKRFAFIRSDSGPTTSFESAAX_{IL116}PGWFLCTA
MEADQPVSLTNMPDEGVMVTKFYFQEDE,

wherein

[0236] m and n are each 0, 1, 2, 3, 4, 5, or 6; X_{L} is a cysteine, lysine, absent, general formula 1 or general formula 2; t2 is 0 or 1; and other variables are defined as the above.

[0237] In one embodiment, the sequence of the fusion protein is

(SEQ ID NO: 239)
HGEGTFTSDLSX_{E12}QMEEEAVRLFIEWLX_{E27}NGGPSSGAPPPS-
(GGGGS)ₘ-X_{L}-(GGGGS)ₙ-X_{IL0}RPSGRKSSKMQAFRIWDVNQKTFYL
RNNQLVAGYLQGPNVNLEEKIDVVPIEPHALFLGIHGGKMCLSCVKSGDE
TRLQLEAVNITDLSENRKQDKRFAFIRSDSGPTTSFESAAX_{IL116}PGWF
LCTAMEADQPVSLTNMPDEGVMVTKFYFQEDE,

in which

[0238] m and n are each 0, 1, 2, 3, 4, 5, or 6 and other variables are defined as the above.

[0239] In one embodiment, the sequence of the fusion protein is

(SEQ ID NO: 240)
HGEGTFTSDLSX_{E12}QMEEEAVRLFIEWLX_{E27}NGGPSSGAPPPX_{E39}-
(GGGGS)ₙ-X_{IL0}RPSGRKSSKMQAPRIWDVNQKTFYLRNNQLVAGYLQG
PNVNLEEKIDVVPIEPHALFLGIHGGKMCLSCVKSGDETRLQLEAVNITD
LSENRKQDKRFAFIRSDSGPTTSPESAAX_{IL116}PGWFLCTAMEADQPVS
LTNMPDEGVMVTKFYFQEDE,

in which n is 0, 1, 2, 3, 4, 5, or 6 and other variables are defined as the above.

[0240] In one embodiment, the sequence of the fusion protein is

(SEQ ID NO: 241)
HGEGTFTSDLSKQMEEEAVRLFIEWLKNGGPSSGAPPPS-(GGGGS)ₙ-
X_{IL0}RPSGRKSSKMQAFRIWDVNQKTFYLRNNQLVAGYLQGPNVNLEEK
IDVVPIEPHALFLGIHGGKMCLSCVKSGDETRLQLEAVNITDLSENRKQ
DKRFAFIRSDSGPTTSFESAAC(S-O_{L})PGWFLCTAMEADQPVSLTNMP
DEGVMVTKFYFQEDE(S is the sulphur atom on the side
chain of a cysteine residue),

wherein

[0241] n is 0, 1, 2, 3, 4, 5, or 6 and other variables are defined as the above.

[0242] In one embodiment, the sequence of the fusion protein is

(SEQ ID NO: 242)
HGEGTFTSDLSKQMEEEAVRLFIEWLKNGGPSSGAPPPS-(GGGGS)ₙ-
X_{IL0}RPSGRKSSKMQAFRIWDVNQKTFYLRNNQLVAGYLQGPNVNLEEK
IDVVPIEPHALFLGIHGGKMCLSCVKSGDETRLQLEAVC (S-O_{L}) IT
DLSENRKQDKRFAFIRSDSGPTTSFESAASPGWFLCTAME ADQPVSLT
NMPDEGVMVTKFYFQEDE (S is the sulphur atom on the
side chain of a cysteine residue),

in which n is 0, 1, 2, 3, 4, 5, or 6 and other variables are defined as the above.

[0243] In one embodiment, the sequence of the fusion protein on the basis of GLP-1 and the interleukin receptor antagonistic protein is

(SEQ ID NO: 243)
X_{G1}X_{G2}X_{G3}GX_{G5}X_{G6}TSDX_{G10}SX_{G12}YLEX_{G16}X_{G17}X_{G18}AX_{G20}
X_{G21}FIX_{G24}X_{G25}LX_{G27}X_{G28}X_{G29}X_{G30}X_{G31}-Lⱼ-X_{IL0}RPSGRKS
SKMQAFRIWDVNQKTFYLRNNQLVAGYLQGPNVNLEEKIDVVPIEPHALF
LGIHGGKMX_{IL66}LSX_{IL69}VKSGDETRLQLEAVX_{IL84}ITDLSENRKQD
KRFAFIRSDSGPTTSFESAAX_{IL116}PGWFLX_{IL122}TAMEADQPVSLTN
MPDEGVMVTKFYFQEDE;

in which each of the variables is defined as the above.

[0244] In one embodiment, the sequence of the fusion protein is

(SEQ ID NO: 244)
HX_{G2}EGTFTSDX_{G10}SX_{G12}YLEX_{G16}QAAX_{G20}EFIAWLVX_{G28}GR
X_{G31}-Lⱼ-X_{IL0}RPSGRKSSKMQAFRIWDVNQKTFYLRNNQLVAGYLQGP
NVNLEEKIDVVPIEPHALFLGIHGGKMCLSCVKSGDETRLQLEAVX_{IL84}
ITDLSENRKQDKRFAFIRSDSGPTTSFESAAX_{IL116}PGWFLCTAMEADQ
PVSLTNMPDEGVMVTKFYFQEDE,

in which each of the variables is defined as the above.

[0245] In one embodiment, the sequence of the fusion protein is

(SEQ ID NO: 245)
HX_{G2}EGTFTSDX_{G10}SX_{G12}YLEX_{G16}QAAX_{G20}EFIAWLVX_{G28}GR
X_{G31}-(GGGGS)ₘ-X_{L}-(GGGGS)ₙ-X_{IL0}RPSGRKSSKMQAFRIWDVNQ
KTFYLRNNQLVAGYLQGPNVNLEEKIDVVPIEPHALFLGIHGGKMCLSCV
KSGDETRLQLEAVX_{IL84}ITDLSENRKQDKRFAFIRSDSGPTTSFESAA
X_{IL116}PGWFLCTAMEADQPVSLTNMPDEGVMVTKFYFQEDE;

in which m and n are each 0, 1, 2, 3, 4, 5, or 6 and other variables are defined as the above.

[0246] In one embodiment, the sequence of the fusion protein is

(SEQ ID NO: 246)
HX_{G2}EGTFTSDX_{G10}SSYLEX_{G16}QAAX_{G20}EFIAWLVX_{G28}GRG-
(GGGGS)ₘ-X_{L}-(GGGGS)ₙ-X_{IL0}RPSGRKSSKMQAFRIWDVNQKTFYL
RNNQLVAGYLQGPNVNLEEKIDVVPIEPHALFLGIHGGKMCLSCVKSGDE
TRLQLEAVNITDLSENRKQDKRFAFIRSDSGPTTSFESAAX_{IL116}PGWF
LCTAMEADQPVSLTNMPDEGVMVTKFYFQEDE,

in which m and n are each 0, 1, 2, 3, 4, 5, or 6 and other variables are defined as the above.

[0247] In one embodiment, the sequence of the fusion protein is

(SEQ ID NO: 247)
HX_{G2}EGTFTSDX_{G10}SSYLEX_{G16}QAAX_{G20}EFIAWLVX_{G28}GRX_{G31}-
(GGGGS)ₙ-X_{IL0}RPSGRKSSKMQAFRIWDVNQKTFYLRNNQLVAGYLQ
GPNVNLEEKIDVVPIEPHALFLGIHGGKMCLSCVKSGDETRLQLEAVNI
TDLSENRKQDKRFAFIRSDSGPTTSFESAAX_{IL116}PGWFLCTAMEADQ
PVSLTNMPDEGVMVTKFYFQEDE,

in which n is 0, 1, 2, 3, 4, 5, or 6 and other variables are defined as the above.

(SEQ ID NO: 248)
HX_{G2}EGTFTSDVSSYLEX_{G16}QAAKEFIAWLVKGRG-(GGGGS)ₙ-X_{IL0}
RPSGRKSSKMQAFRIWDVNQKTFYLRNNQLVAGYLQGPNVNLEEKIDVVP
IEPHALFLGIHGGKMCLSCVKSGDETRLQLEAVNITDLSENRKQDKRFAF
IRSDSGPTTSFESAAC(S-O_{L})PGWFLCTAMEADQPVSLTNMPDEGVMVT
KFYFQEDE (S is the sulphur atom on the side chain
of a cysteine residue),

wherein n is 0, 1, 2, 3, 4, 5, or 6 and other variables are defined as the above.

[0248] In one embodiment, the sequence of the fusion protein is

(SEQ ID NO: 249)
HX_{G2}EGTFTSDVSSYLEX_{G16}QAAKEFIAWLVKGRG-(GGGGS)ₙ-X_{IL0}
RPSGRKSSKMQAFRIWDVNQKTFYLRNNQLVAGYLQGPNVNLEEKIDVVP
IEPHALFLGIHGGKMCLSCVKSGDETRLQLEAVC(S-O_{L})ITDLSENRKQ
DKRFAFIRSDSGPTTSFESAASPGWFLCTAMEADQPVSLTNMPDEGVMVT
KFYFQEDE(S is the sulphur atom on the side chain
of a cysteine residue),

wherein n is 0, 1, 2, 3, 4, 5, or 6 and other variables are defined as the above.

[0249] In one embodiment, the sequence of the fusion protein is

(SEQ ID NO: 250)
HX_{G2}EGTFTSDX_{G10}SSYLEX_{G16}QAAX_{G20}EFIAWLVX_{G28}GRPSSGAP
PPS-(GGGGS)ₘ-X_{L}-(GGGGS)ₙ-X_{IL0}RPSGRKSSKMQAFRIWDVNQK
TFYLRNNQLVAGYLQGPNVNLEEKIDVVPIEPHALFLGIHGGKMCLSCVK
SGDETRLQLEAVNITDLSENRKQDKRFAFIRSDSGPTTSFESAAX_{IL116}
CPGWFLCTAMEADQPVSLTNMPDEGVMVTKFYFQEDE,

wherein m and n are each 0, 1, 2, 3, 4, 5, or 6; X_{L} is a cysteine, lysine or absent, or is general formula 1 or general formula 2; and other variables are defined as the above.

[0250] In one embodiment, the sequence of the fusion protein is

(SEQ ID NO: 251)
HX_{G2}EGTFTSDX_{G10}SSYLEX_{G16}QAAX_{G20}EFIAWLVX_{G28}GRPSSGAP
PPX_{G39}-(GGGGS)ₙ-X_{IL0}RPSGRKSSKMQAFRIWDVNQKTFYLRNNQL
VAGYLQGPNVNLEEKIDVVPIEPHALFLGIHGGKMCLSCVKSGDETRLQL
EAVNITDLSENRKQDKRFAFIRSDSGPTTSFESAAX_{IL116}PGWFLCTAM
EADQPVSLTNMPDEGVMVTKFYFQEDE,

in which n is 0, 1, 2, 3, 4, 5, or 6 and other variables are defined as the above.

[0251] In one embodiment, the sequence of the fusion protein is

(SEQ ID NO: 252)
HX_{G2}EGTFTSDVSSYLEX_{G16}QAAKEFIAWLVKGRPSSGAPPPS-
(GGGGS)ₙ-X_{IL0}RPSGRKSSKMQAFRIWDVNQKTFYLRNNQLVAGYLQG
PNVNLEEKIDVVPIEPHALFLGIHGGKMCLSCVKSGDETRLQLEAVNITD
LSENRKQDKRFAFIRSDSGPTTSFESAAC(S-O_{L})PGWFLCTAMEADQPV
SLTNMPDEGVMVTKFYFQEDE(S is the sulphur atom on the/
side chain of a cysteine residue),

wherein n is 0, 1, 2, 3, 4, 5, or 6 and other variables are defined as the above.

[0252] In one embodiment, the sequence of the fusion protein is

(SEQ ID NO: 253)
HX_{G2}EGTFTSDVSSYLEX_{G16}QAAKEFIAWLVKGRPSSGAPPPS-
(GGGGS)ₙ-X_{IL0}RPSGRKSSKMQAFRIWDVNQKTFYLRNNQLVAGYLQG
PNVNLEEKIDVVPIEPHALFLGIHGGKMCLSCVKSGDETRLQLEAVC(S-
O_{L})ITDLSENRKQDKRFAFIRSDSGPTTSFESAASPGWFLCTAMEADQPV
SLTNMPDEGVMVTKFYFQEDE(S is the sulphur atom on the
side chain of a cysteine residue),

wherein n is 0, 1, 2, 3, 4, 5, or 6 and other variables are defined as the above.

[0253] In one embodiment, the GLP-1 receptor binding polypeptide, the interleukin-1 receptor antagonistic protein, and a biomacromolecule form a single chain compound, for which the structure is (from left to right corresponding to the amino acid sequence from N-terminus to C-terminus):

[0254] GLP-1 receptor binding polypeptide—linking group (or spacer group)-biomacromolecule-linking group (or spacer group)-interleukin-1 receptor antagonistic protein;

[0255] GLP-1 receptor binding polypeptide—linking group (or spacer group)-interleukin-1 receptor antagonistic protein-linking group (or spacer group)-biomacromolecule; in which the biomacromolecule may be an albumin or IgG Fc, etc.

[0256] In one embodiment, the sequence of the fusion protein comprising the human albumin is:

(SEQ ID NO: 254)
HGEGTFTSDLSKQMEEEAVRLFIEWLKNGGPSSGAPPPS-(GGGGS)ₘ-D
AHKSEVAHRFKDLGEENFKALVLIAFAQYLQQCPFEDHVKLVNEVTEFAK
TCVADESAENCDKSLHTLFGDKLCTVATLRETYGEMADCCAKQEPERNEC
FLQHKDDNPNLPRLVRPEVDVMCTAFHDNEETFLKKYLYEIARRHPYFYA
PELLFFAKRYKAAFTECCQAADKAACLLPKLDELRDEGKASSAKQRLKCA
SLQKFGERAFKAWAVARLSQRFPKAEFAEVSKLVTDLTKVHTECCHGDLL
ECADDRADLAKYICENQDSISSKLKECCEKPLLEKSHCIAEVENDEMPAD
LPSLAADFVESKDVCKNYAEAKDVFLGMFLYEYARRHPDYSVVLLLRLAK
TYETTLEKCCAAADPHECYAKVFDEFKPLVEEPQNLIKQNCELFEQLGEY
KFQNALLVRYTKKVPQVSTPTLVEVSRNLGKVGSKCCKHPEAKRMPCAED
YLSVVLNQLCVLHEKTPVSDRVTKCCTESLVNRRPCFSALEVDETYVPKE
FNAETFTFHADICTLSEKERQIKKQTALVELVKHKPKATKEQLKAVMDDF
AAFVEKCCKADDKETCFAEEGKKLVAASQAALGL-(GGGGS)ₙ-X_{IL0}RP
SGRKSSKMQAFRIWDVNQKTFYLRNNQLVAGYLQGPNVNLEEKIDVVPIE
PHALFLGIHGGKMCLSCVKSGDETRLQLEAVNITDLSENRKQDKRFAFIR
SDSGPTTSFESAACPGWFLCTAMEADQPVSLTNMPDEGVMVTKFYFQED
E,

in which m and n are each 0, 1, 2, 3, 4, 5, or 6 and other variables are defined as the above.

[0257] In one embodiment, the sequence of the fusion protein with the human albumin is:

(SEQ ID NO: 255)
HGEGTFTSDLSKQMEEEAVRLFIEWLKNGGPSSGAPPPS-(GGGGS)ₘ-
X_{IL0}RPSGRKSSKMQAFRIWDVNQKTFYLRNNQLVAGYLQGPNVNLEEKI
DVVPIEPHALFLGIHGGKMCLSCVKSGDETRLQLEAVNITDLSENRKQDK
RFAFIRSDSGPTTSFESAACPGWFLCTAMEADQPVSLTNMPDEGVMVTKF
YFQEDE-(GGGGS)ₙ-DAHKSEVAHRFKDLGEENFKALVLIAFAQYLQQC
PFEDHVKLVNEVTEFAKTCVADESAENCDKSLHTLFGDKLCTVATLRETY
GEMADCCAKQEPERNECFLQHKDDNPNLPRLVRPEVDVMCTAFHDNEETF
LKKYLYEIARRHPYFYAPELLFFAKRYKAAFTECCQAADKAACLLPKLDE
LRDEGKASSAKQRLKCASLQKFGERAFKAWAVARLSQRFPKAEFAEVSKL
VTDLTKVHTECCHGDLLECADDRADLAKYICENQDSISSKLKECCEKPLL
EKSHCIAEVENDEMPADLPSLAADFVESKDVCKNYAEAKDVFLGMFLYEY
ARRHPDYSVVLLLRLAKTYETTLEKCCAAADPHECYAKVFDEFKPLVEEP
QNLIKQNCELFEQLGEYKFQNALLVRYTKKVPQVSTPTLVEVSRNLGKVG
SKCCKHPEAKRMPCAEDYLSVVLNQLCVLHEKTPVSDRVTKCCTESLVNR
RPCFSALEVDETYVPKEFNAETFTFHADICTLSEKERQIKKQTALVELVK
HKPKATKEQLKAVMDDFAAFVEKCCKADDKETCFAEEGKKLVAASQAALG
L,

in which m and n are each 0, 1, 2, 3, 4, 5, or 6 and other variables are defined as the above.

[0258] In one embodiment, the sequence of the fusion protein with the human albumin is:

(SEQ ID NO: 256)
HX_{G2}EGTFTSDVSSYLEX_{G16}QAAKEFIAWLVKGRG-(GGGGS)ₘ-DAHK
SEVAHRFKDLGEENFKALVLIAFAQYLQQCPFEDHVKLVNEVTEFAKTCV
ADESAENCDKSLHTLFGDKLCTVATLRETYGEMADCCAKQEPERNECFLQ
HKDDNPNLPRLVRPEVDVMCTAFHDNEETFLKKYLYEIARRHPYFYAPEL
LFFAKRYKAAFTECCQAADKAACLLPKLDELRDEGKASSAKQRLKCASLQ
KFGERAFKAWAVARLSQRFPKAEFAEVSKLVTDLTKVHTECCHGDLLECA
DDRADLAKYICENQDSISSKLKECCEKPLLEKSHCIAEVENDEMPADLPS
LAADFVESKDVCKNYAEAKDVFLGMFLYEYARRHPDYSVVLLLRLAKTYE
TTLEKCCAAADPHECYAKVFDEFKPLVEEPQNLIKQNCELFEQLGEYKFQ
NALLVRYTKKVPQVSTPTLVEVSRNLGKVGSKCCKHPEAKRMPCAEDYLS
VVLNQLCVLHEKTPVSDRVTKCCTESLVNRRPCFSALEVDETYVPKEFNA
ETFTFHADICTLSEKERQIKKQTALVELVKHKPKATKEQLKAVMDDFAAF
VEKCCKADDKETCFAEEGKKLVAASQAALGL-(GGGGS)ₙ-X_{IL0}RPSGR
KSSKMQAFRIWDVNQKTFYLRNNQLVAGYLQGPNVNLEEKIDVVPIEPHA
LFLGIHGGKMCLSCVKSGDETRLQLEAVNITDLSENRKQDKRFAFIRSDS
GPTTSFESAACPGWFLCTAMEADQPVSLTNMPDEGVMVTKFYFQEDE,

wherein m and n are each 0, 1, 2, 3, 4, 5, or 6 and other variables are defined as the above.

[0259] In one embodiment, the sequence of the fusion protein with the human albumin is:

(SEQ ID NO: 257)
HX_{G2}EGTFTSDVSSYLEX_{G16}QAAKEFIAWLVKGRG-(GGGGS)ₘ-X_{IL0}
RPSGRKSSKMQAFRIWDVNQKTFYLRNNQLVAGYLQGPNVNLEEKIDVVP
IEPHALFLGIHGGKMCLSCVKSGDETRLQLEAVNITDLSENRKQDKRFAF
IRSDSGPTTSFESAACPGWFLCTAMEADQPVSLTNMPDEGVMVTKFYFQE
DE-(GGGGS)ₙ-DAHKSEVAHRFKDLGEENFKALVLIAFAQYLQQCPPED
HVKLVNEVTEFAKTCVADESAENCDKSLHTLFGDKLCTVATLRETYGEMA
DCCAKQEPERNECFLQHKDDNPNLPRLVRPEVDVMCTAFHDNEETFLKKY
LYEIARRHPYFYAPELLHAKRYKAAFTECCQAADKAACLLPKLDELRDEG
KASSAKQRLKCASLQKFGERAFKAWAVARLSQRFPKAEFAEVSKLVTDLT
KVHTECCHGDLLECADDRADLAKYICENQDSISSKLKECCEKPLLEKSHC
IAEVENDEMPADLPSLAADFVESKDVCKNYAEAKDVFLGMFLYEYARRHP
DYSVVLLLRLAKTYETTLEKCCAAADPHECYAKVFDEFKPLVEEPQNLIK
QNCELPEQLGEYKFQNALLVRYTKKVPQVSTPTLVEVSRNLGKVGSKCCK
HPEAKRMPCAEDYLSVVLNQLCVLHEKTPVSDRVTKCCTESLVNRRPCFS
ALEVDETYVPKEFNAETFTFHADICTLSEKERQIKKQTALVELVKHKPKA
TKEQLKAVMDDFAAFVEKCCKADDKETCFAEEGKKLVAASQAALGL,

and other variables are defined as the above.

[0260] In one embodiment, the sequence of the fusion protein with the human albumin is:

(SEQ ID NO: 258)
HX_{G2}EGTFTSDVSSYLEX_{G16}QAAKEFIAWLVKGRHX_{G2}EGTFTSDVSSY
LEX_{G16}QAAKEFIAWLVKGR-(GGGGS)ₘ-RPSGRKSSKMQAFRIWDVNQ
KTFYLRNNQLVAGYLQGPNVNLEEKIDVVPIEPHALFLGIHGGKMCLSCV
KSGDETRLQLEAVNITDLSENRKQDKRFAFIRSDSGPTTSFESAACPGWF
LCTAMEADQPVSLTNMPDEGVMVTKFYFQEDE-(GGGGS)ₙ-DAHKSEVA
HRFKDLGEENFKALVLIAFAQYLQQCPFEDHVKLVNEVTEFAKTCVADES
AENCDKSLHTLFGDKLCTVATLRETYGEMADCCAKQEPERNECFLQHKDD
NPNLPRLVRPEVDVMCTAFHDNEETFLKKYLYEIARRHPYFYAPELLHAK
RYKAAFTECCQAADKAACLLPKLDELRDEGKASSAKQRLKCASLQKFGER
AFKAWAVARLSQRFPKAEFAEVSKLVTDLTKVHTECCHGDLLECADDRAD
LAKYICENQDSISSKLKECCEKPLLEKSHCIAEVENDEMPADLPSLAADF
VESKDVCKNYAEAKDVFLGMFLYEYARRHPDYSVVLLLRLAKTYETTLEK
CCAAADPHECYAKVFDEFKPLVEEPQNLIKQNCELFEQLGEYKFQNALLV
RYTKKVPQVSTPTLVEVSRNLGKVGSKCCKHPEAKRMPCAEDYLSVVLNQ
LCVLHEKTPVSDRVTKCCTESLVNRRPCFSALEVDETYVPKEFNAETFTF
HADICTLSEKERQIKKQTALVELVKHKPKATKEQLKAVMDDFAAFVEKCC
KADDKETCFAEEGKKLVAASQAALGL,

wherein m and n are each 0, 1, 2, 3, 4, 5, or 6 and other variables are defined as the above.

[0261] In one embodiment, the sequence of the fusion protein with the human albumin is:

(SEQ ID NO: 259)
HX_{G2}EGTFTSDVSSYLEX_{G16}QAAKEFIAWLVKGRHX_{G2}EGTFTSDVSSY
LEX_{G16}QAAKEFIAWLVKGR-(GGGGS)ₘ-DAHKSEVAHRFKDLGEENFK
ALVLIAFAQYLQQCPFEDHVKLVNEVTEFAKTCVADESAENCDKSLHTLF
GDKLCTVATLRETYGEMADCCAKQEPERNECFLQHKDDNPNLPRLVRPEV
DVMCTAFHDNEETFLKKYLYEIARRHPYFYAPELLFFAKRYKAAFTECCQ
AADKAACLLPKLDELRDEGKASSAKQRLKCASLQKFGERAFKAWAVARLS
QRFPKAEFAEVSKLVTDLTKVHTECCHGDLLECADDRADLAKYICENQDS
ISSKLKECCEKPLLEKSHCIAEVENDEMPADLPSLAADFVESKDVCKNYA
EAKDVFLGMFLYEYARRHPDYSVVLLLRLAKTYETTLEKCCAAADPHECY
AKVFDEFKPLVEEPQNLIKQNCELFEQLGEYKFQNALLVRYTKKVPQVST
PTLVEVSRNLGKVGSKCCKHPEAKRMPCAEDYLSVVLNQLCVLHEKTPVS
DRVTKCCTESLVNRRPCFSALEVDETYVPKEFNAETFTFHADICTLSEKE
RQIKKQTALVELVKHKPKATKEQLKAVMDDFAAFVEKCCKADDKETCFAE
EGKKLVAASQAALGL-(GGGGS)ₙ-RPSGRKSSKMQAFRIWDVNQKTFYL
RNNQLVAGYLQGPNVNLEEKIDVVPIEPHALFLGIHGGKMCLSCVKSGDE
TRLQLEAVNITDLSENRKQDKRFAFIRSDSGPTTSFESAACPGWFLCTAM
EADQPVSLTNMPDEGVMVTKFYFQEDE;

wherein m and n are each 0, 1, 2, 3, 4, 5, or 6 and other variables are defined as the above.

[0262] In one embodiment, the sequence of the fusion protein with the human albumin is:

(SEQ ID NO: 260)
HGEGTFTSDLSKQMEEEAVRLFIEWLKNGG(PSSGAPPPS)ₜ₂HGEGTFT
SDLSKQMEEEAVRLFIEWLKNGG(PSSGAPPPS)ₜ₂-(GGGGS)ₘ-RPSG
RKSSKMQAFRIWDVNQKTFYLRNNQLVAGYLQGPNVNLEEKIDVVPIEPH
ALFLGIHGGKMCLSCVKSGDETRLQLEAVNITDLSENRKQDKRFAFIRSD
SGPTTSFESAACPGWFLCTAMEADQPVSLTNMPDEGVMVTKFYFQEDE-
(GGGGS)ₙ-DAHKSEVAHRFKDLGEENFKALVLIAFAQYLQQCPPEDHVK
LVNEVTEFAKTCVADESAENCDKSLHTLFGDKLCTVATLRETYGEMADCC
AKQEPERNECFLQHKDDNPNLPRLVRPEVDVMCTAFHDNEETFLKKYLYE
IARRHPYFYAPELLFFAKRYKAAFTECCQAADKAACLLPKLDELRDEGKA
SSAKQRLKCASLQKFGERAFKAWAVARLSQRFPKAEFAEVSKLVTDLTKV
HTECCHGDLLECADDRADLAKYICENQDSISSKLKECCEKPLLEKSHCIA
EVENDEMPADLPSLAADFVESKDVCKNYAEAKDVFLGMFLYEYARRHPDY
SVVLLLRLAKTYETTLEKCCAAADPHECYAKVFDEFKPLVEEPQNLIKQN
CELFEQLGEYKFQNALLVRYTKKVPQVSTPTLVEVSRNLGKVGSKCCKHP
EAKRMPCAEDYLSVVLNQLCVLHEKTPVSDRVTKCCTESLVNRRPCFSAL
EVDETYVPKEFNAETFTFHADICTLSEKERQIKKQTALVELVKHKPKATK
EQLKAVMDDFAAFVEKCCKADDKETCFAEEGKKLVAASQAALGL,

wherein m and n are each 0, 1, 2, 3, 4, 5, or 6 and t2 is 0 or 1.

[0263] In one embodiment, the sequence of the fusion protein with the human albumin is:

(SEQ ID NO: 261)
HGEGTFTSDLSKQMEEEAVRLFIEWLKNGG(PSSGAPPPS)ₜ₂HGEGTFT
SDLSKQMEEEAVRLFIEWLKNGG(PSSGAPPPS)ₜ₂-(GGGGS)ₘ-DAHK
SEVAHRFKDLGEENFKALVLIAFAQYLQQCPFEDHVKLVNEVTEFAKTCV
ADESAENCDKSLHTLFGDKLCTVATLRETYGEMADCCAKQEPERNECFLQ
HKDDNPNLPRLVRPEVDVMCTAFHDNEETFLKKYLYEIARRHPYFYAPEL
LFFAKRYKAAFTECCQAADKAACLLPKLDELRDEGKASSAKQRLKCASLQ
KFGERAFKAWAVARLSQRFPKAEFAEVSKLVTDLTKVHTECCHGDLLECA
DDRADLAKYICENQDSISSKLKECCEKPLLEKSHCIAEVENDEMPADLPS
LAADFVESKDVCKNYAEAKDVFLGMFLYEYARRHPDYSVVLLLRLAKTYE
TTLEKCCAAADPHECYAKVFDEFKPLVEEPQNLIKQNCELFEQLGEYKFQ
NALLVRYTKKVPQVSTPTLVEVSRNLGKVGSKCCKHPEAKRMPCAEDYLS
VVLNQLCVLHEKTPVSDRVTKCCTESLVNRRPCFSALEVDETYVPKEFNA
ETFTFHADICTLSEKERQIKKQTALVELVKHKPKATKEQLKAVMDDFAAF
VEKCCKADDKETCFAEEGKKLVAASQAALGL-(GGGGS)ₙ-RPSGRKSSK
MQAFRIWDVNQKTFYLRNNQLVAGYLQGPNVNLEEKIDVVPIEPHALFLG
IHGGKMCLSCVKSGDETRLQLEAVNITDLSENRKQDKRFAFIRSDSGPTT
SFESAACPGWFLCTAMEADQPVSLTNMPDEGVMVTKFYFQEDE,

wherein m and n are each 0, 1, 2, 3, 4, 5, or 6 and t2 is 0 or 1.

[0264] In one embodiment, the sequence of the fusion protein with IgG1 Fc is

(SEQ ID NO: 262)
HGEGTFTSDLSKQMEEEAVRLFIEWLKNGGPSSGAPPPS-(GGGGS)ₘ-
X_{IL0}RPSGRKSSKMQAFRIWDVNQKTFYLRNNQLVAGYLQGPNVNLEEKI
DVVPIEPHALFLGIHGGKMCLSCVKSGDETRLQLEAVNITDLSENRKQDK
RFAFIRSDSGPTTSFESAACPGWFLCTAMEADQPVSLTNMPDEGVMVTKF
YFQEDE-(GGGGS)ₙ-AEPKSCDKTHTCPPCPAPELLGGPSVFLFPPKPK
DTLMISRTPEVTCVVVDVSHEDPEVKFNWYVDGVEVHNAKTKPREEQYNS
TYRVVSVLTVLHQDWLNGKEYKCKVSNKALPAPIEKTISKAKGQPREPQV
YTLPPSREEMTKNQVSLTCLVKGFYPSDIAVEWESNGQPENNYKTTPPVL
DSDGSFFLYSKLTVDKSRWQQGNVFSCSVMHEALHNHYTQKSLSLSPGK,

wherein m and n are each 0, 1, 2, 3, 4, 5, or 6 and X_{IL0} is a methionine, cysteine, general formula 1, general formula 2 or absent.

[0265] In one embodiment, the sequence of the fusion protein with IgG1 Fc is

(SEQ ID NO: 263)
HGEGTFTSDLSKQMEEEAVRLFIEWLKNGGPSSGAPPPS-(GGGGS)ₘ-
AEPKSCDKTHTCPPCPAPELLGGPSVFLFPPKPKDTLMISRTPEVTCVV
VDVSHEDPEVKFNWYVDGVEVHNAKTKPREEQYNSTYRVVSVLTVLHQD
WLNGKEYKCKVSNKALPAPIEKTISKAKGQPREPQVYTLPPSREEMTKN
QVSLTCLVKGFYPSDIAVEWESNGQPENNYKTTPPVLDSDGSFFLYSKL
TVDKSRWQQGNVFSCSVMHEALHNHYTQKSLSLSPGK-(GGGGS)ₙ-
X_{IL0}RPSGRKSSKMQAFRIWDVNQKTFYLRNNQLVAGYLQGPNVNLEEKI
DVVPIEPHALFLGIHGGKMCLSCVKSGDETRLQLEAVNITDLSENRKQDK
RFAFIRSDSGPTTSFESAACPGWFLCTAMEADQPVSLTNMPDEGVMVTKF
YFQEDE,

wherein m and n are each 0, 1, 2, 3, 4, 5, or 6 and X_{IL0} is a methionine, cysteine, general formula 1, general formula 2 or absent.

[0266] In one embodiment, the sequence of the fusion protein with IgG1 Fc is

(SEQ ID NO: 264)
HX_{G2}EGTFTSDVSSYLEX_{G16}QAAKEFIAWLVKGRG-(GGGGS)ₘ-X_{IL0}
RPSGRKSSKMQAFRIWDVNQKTFYLRNNQLVAGYLQGPNVNLEEKIDVVP
IEPHALFLGIHGGKMCLSCVKSGDETRLQLEAVNITDLSENRKQDKRFAF
IRSDSGPTTSFESAACPGWFLCTAMEADQPVSLTNMPDEGVMVTKFYFQE
DE-(GGGGS)ₙ-AEPKSCDKTHTCPPCPAPELLGGPSVFLFPPKPKDTLM
ISRTPEVTCVVVDVSHEDPEVKFNWYVDGVEVHNAKTKPREEQYNSTYRV
VSVLTVLHQDWLNGKEYKCKVSNKALPAPIEKTISKAKGQPREPQVYTLP
PSREEMTKNQVSLTCLVKGFYPSDIAVEWESNGQPENNYKTTPPVLDSDG
SFFLYSKLTVDKSRWQQGNVFSCSVMHEALHNHYTQKSLSLSPGK,

wherein m and n are each 0, 1, 2, 3, 4, 5, or 6 and other variables are individually defined as the above.

[0267] In one embodiment, the sequence of the fusion protein with IgG1 Fc is

(SEQ ID NO: 265)
HX_{G2}EGTFTSDVSSYLEX_{G16}QAAKEFIAWLVKGRG-(GGGGS)ₘ-AEPK
SCDKTHTCPPCPAPELLGGPSVFLFPPKPKDTLMISRTPEVTCVVVDVSH
EDPEVKFNWYVDGVEVHNAKTKPREEQYNSTYRVVSVLTVLHQDWLNGKE
YKCKVSNKALPAPIEKTISKAKGQPREPQVYTLPPSREEMTKNQVSLTCL
VKGFYPSDIAVEWESNGQPENNYKTTPPVLDSDGSFFLYSKLTVDKSRWQ
QGNVFSCSVMHEALHNHYTQKSLSLSPGK-(GGGGS)ₙ-X_{IL0}RPSGRKS
SKMQAFRIWDVNQKTFYLRNNQLVAGYLQGPNVNLEEKIDVVPIEPHALF
LGIHGGKMCLSCVKSGDETRLQLEAVNITDLSENRKQDKRFAFIRSDSGP
TTSFESAACPGWFLCTAMEADQPVSLTNMPDEGVMVTKFYFQEDE,

wherein m and n are each 0, 1, 2, 3, 4, 5, or 6 and other variables are individually defined as the above.

[0268] The dimeric protein is a homodimer consisting of two identical sequences mentioned above, and connected by an interchain disulfide bond formed between the cysteines of the Fc portions of the two monomeric proteins.

[0269] In one embodiment, the sequence of the monomer in the fusion protein consisting of the IgG 4 Fc and the interleukin-1 receptor antagonistic protein is:

(SEQ ID NO: 266)
HX_{G2}EGTFTSDVSSYLEEQAAKEFIAWLVKGGG-(GGGGS)ₘ-RPSGRKS
SKMQAFRIWDVNQKTFYLRNNQLVAGYLQGPNVNLEEKIDVVPIEPHALF
LGIHGGKMCLSCVKSGDETRLQLEAVNITDLSENRKQDKRFAFIRSDSGP
TTSFESAAX_{IL116}PGWFLCTAMEADQPVSLTNMPDEGVMVTKFYFQED
E-(GGGGS)ₙ-AESKYGPPCPPCPAPEAAGGPSVFLFPPKPKDTLMISRT
PEVTCₐVVVDVSQEDPEVQFNWYVDGVEVHNAKTKPREEQFNSTYRVVSV
LTVLHQDWLNGKEYKCₐKVSNKGLPSSIEKTISKAKGQPREPQVYTLPPS
QEEMTKNQVSLTC_{b}LVKGFYPSDIAVEWESNGQPENNYKTTPPVLDSDGS
FFLYSRLTVDKSRWQEGNVFSC_{b}SVMHEALHNHYTQKSLSLSLG,

wherein m and n are each 0, 1, 2, 3, 4, 5, or 6 and other variables are defined as the above.

[0270] The dimeric protein is a homodimer consisting of two identical sequences mentioned above. Each cysteine C underlined and the cysteine at the corresponding position in the other monomer form an interchain disulfide bond; an intrachain disulfide bond is formed between the Cₐs in each monomer; and an intrachain disulfide bond is formed between the C_{b}s in each monomer.

[0271] In one embodiment, the sequence of the monomer in the fusion protein consisting of the IgG 4 Fc and the interleukin-1 receptor antagonistic protein is:

(SEQ ID NO: 267)
HGEGTFTSDLSKQMEEEAVRLFIEWLKNGG-(PSSGAPPPS)ₜ₂-
(GGGGS)ₘ-RPSGRKSSKMQAFRIWDVNQKTFYLRNNQLVAGYLQGPNVN
LEEKIDVVPIEPHALFLGIHGGKMCLSCVKSGDETRLQLEAVNITDLSEN
RKQDKRFAFIRSDSGPTTSFESAAX_{IL116}PGWFLCTAMEADQPVSLTNM
PDEGVMVTKFYFQEDE-(GGGGS)ₙ-AESKYGPPCPPCPAPEAAGGPSVF
LFPPKPKDTLMISRTPEVTCₐVVVDVSQEDPEVQFNWYVDGVEVHNAKTK
PREEQFNSTYRVVSVLTVLHQDWLNGKEYKCₐKVSNKGLPSSIEKTISKA
KGQPREPQVYTLPPSQEEMTKNQVSLTC_{b}LVKGFYPSDIAVEWESNGQPE
NNYKTTPPVLDSDGSFFLYSRLTVDKSRWQEGNVFSC_{b}SVMHEALHNHYT
QKSLSLSLG,

wherein m and n are each 0, 1, 2, 3, 4, 5, or 6 and other variables are defined as the above.

[0272] The dimeric protein is a homodimer consisting of two identical sequences mentioned above. Each cysteine C underlined and the cysteine at the corresponding position in the other monomer form an interchain disulfide bond; an intrachain disulfide bond is formed between the Cₐs in each monomer; and an intrachain disulfide bond is formed between the C_{b}s in each monomer.

[0273] (2) the fusion protein consisting of the interleukin-1 receptor antagonistic protein—the linking group or spacer group—the GLP-1 receptor binding polypeptide The interleukin-1 receptor antagonistic protein can be cross-linked to the GLP-1 receptor binding polypeptide through a linking group (or a spacer group), by using a cysteine at position 116 or introducing a cysteine at position 0 (or at the N-terminus), 6, 8, 9, 84, 141, or 153 (or at the C-terminus).

[0274] In one embodiment, the sequence of the fusion protein is

(SEQ ID NO: 268)
U_{L}-X_{IL0}RPSGRKSSKMQAFRIWDVNQKTFYLRNNQLVAGYLQGPNVNLE
EKIDVVPIEPHALFLGIHGGKMCLSCVKSGDETRLQLEAVNITDLSENRK
QDKRFAFIRSDSGPTTSFESAAC (linking group - GLP-1
receptor binding polypeptide)PGWFLCTAMEADQPVSLTNMP
DEGVMVTKFYFQEDE;

[0275] In another embodiment, the sequence of the fusion protein is

(SEQ ID NO: 269)
U_{L}-X_{IL0}RPSGRKSSKMQAFRIWDVNQKTFYLRNNQLVAGYLQGPNVNLE
EKIDVVPIEPHALFLGIHGGKMCLSCVKSGDETRLQLEAVC (linking
group - GLP-1 receptor binding polypeptide) ITDLSE
NRKQDKRFAFIRSDSGPTTSFESAASPGWFLCTAMEADQPVSLTNMPDEG
VMVTKFYFQEDE;

[0276] wherein U_{L} is a structure of -W-X-Y-Z, fatty acid, polyethylene glycol, albumin, IgG Fc, glycosyl, hydrogen atom, N^{α}—(N^{α}—(HOOC(CH₂)ₙCO)-γ-Glu)-, or N^{α}—(N^{α}—(CH₃(CH₂)ₙCO)-γ-Glu)-, in which n is an integer from 8 to 20, such as 10, 12, 14, 16, 18 or 20; N^{α} indicates the α-amino group of an amino acid or amino acid residue or general formula 5; and other variables are individually defined as the above. The structure of general formula 5 is

[chemical structure]

[0277] In one particular embodiment, the molecular structure of the linking group may be maleimide-PEG-maleimide or I—CH₂—CONH-PEG-NHCO—CH₂—I; in one particular embodiment, the molecular structure of the linking group may be maleimide-(CH₂)ₙ-maleimide or I—CH₂—CONH—(CH₂)ₙ—NHCO—CH₂—I, in which n may be an integer from 1 to 30; in one particular embodiment, the molecular structure of the linking group may be maleimide-PEG-NHS. The GLP-1 receptor binding polypeptide may typically react with the linking group through the amino or mercapto group on the side chain of an amino acid residue.

[0278] In one embodiment, the sequence of the GLP-1 receptor binding polypeptide may be

(SEQ ID NO: 270)
X_{E1}X_{E2}EGTFTSDX_{E10}SX_{E12}QX_{E14}EEEAVX_{E20}LFIEWLX_{E27}X_{E28}
X_{E29}X_{E30}(PX_{E32}X_{E33}GX_{E35}PPPC)ₜ₂;
(SEQ ID NO: 271)
X_{E1}X_{E2}EGTFTSDX_{E10}SX_{E12}QX_{E14}EEEAVX_{E20}LFIEWLX_{E27}X_{E28}
X_{E29}X_{E30}(PX_{E32}X_{E33}GCPPPX_{E39})ₜ₂;
(SEQ ID NO: 272)
X_{E1}X_{E2}EGTFTSDX_{E10}SX_{E12}QX_{E14}EEEAVX_{E20}LFIEWLX_{E27}X_{E28}
X_{E29}X_{E30}(PX_{E32}CGX_{E35}PPPX_{E39})ₜ₂;
(SEQ ID NO: 273)
X_{E1}X_{E2}EGTFTSDX_{E10}SX_{E12}QX_{E14}EEEAVX_{E20}LFIEWLX_{E27}X_{E28}
X_{E29}X_{E30}(PCX_{E33}GX_{E35}PPPX_{E39})ₜ₂;
(SEQ ID NO: 274)
X_{E1}X_{E2}EGTFTSDX_{E10}SX_{E12}QX_{E14}EEEAVX_{E20}LFIEWLX_{E27}X_{E28}
X_{E29}C(PX_{E32}X_{E33}GX_{E35}PPPX_{E39})ₜ₂;
(SEQ ID NO: 275)
X_{E1}X_{E2}EGTFTSDX_{E10}SX_{E12}QX_{E14}EEEAVX_{E20}LFIEWLX_{E27}X_{E28}
CX_{E30}(PX_{E32}X_{E33}GX_{E35}PPPX_{E39})ₜ₂;
(SEQ ID NO: 276)
X_{E1}X_{E2}EGTFTSDX_{E10}SX_{E12}QX_{E14}EEEAVX_{E20}LFIEWLX_{E27}C
X_{E29}X_{E30}(PX_{E32}X_{E33}GX_{E35}PPPX_{E39})ₜ₂;
(SEQ ID NO: 277)
X_{E1}X_{E2}EGTFTSDX_{E10}SX_{E12}QX_{E14}EEEAVX_{E20}LFIEWLCX_{E28}
X_{E29}X_{E30}(PX_{E32}X_{E33}GX_{E35}PPPX_{E39})ₜ₂;
(SEQ ID NO: 278)
X_{E1}X_{E2}EGTFTSDX_{E10}SX_{E12}QX_{E14}EEEAVCLFIEWLX_{E27}X_{E28}
X_{E29}X_{E30}(PX_{E32}X_{E33}GX_{E35}PPPX_{E39})ₜ₂;
(SEQ ID NO: 279)
X_{E1}X_{E2}EGTFTSDX_{E10}SX_{E12}QCEEEAVX_{E20}LFIEWLX_{E27}X_{E28}
X_{E29}X_{E30}(PX_{E32}X_{E33}GX_{E35}PPPX_{E39})ₜ₂;
(SEQ ID NO: 280)
X_{E1}X_{E2}EGTFTSDX_{E10}SCQX_{E14}EEEAVX_{E20}LFIEWLX_{E27}X_{E28}
X_{E29}X_{E30}(PX_{E32}X_{E33}GX_{E35}PPPX_{E39})ₜ₂;
(SEQ ID NO: 281)
X_{E1}X_{E2}EGTFTSDCSX_{E12}QX_{E14}EEEAVX_{E20}LFIEWLX_{E27}X_{E28}
X_{E29}X_{E30}(PX_{E32}X_{E33}GX_{E35}PPPX_{E39})ₜ₂;

the variables in the individual sequences are individually defined as the above.

[0279] In one particular embodiment, the sequence of the GLP-1 receptor binding polypeptide may be one of the following sequences:

(SEQ ID NO: 282)
HGEGTFTSDLSKQMEEEAVRLFIEWLKNGGPSSGAPPPSC;
(SEQ ID NO: 185)
HGEGTFTSDLSKQMEEEAVRLFIEWLKNGGPSSGAPPPC;
(SEQ ID NO: 284)
HGEGTFTSDLSKQMEEEAVRLFIEWLKNGGPSSGCPPPS;
(SEQ ID NO: 285)
HGEGTFTSDLSKQMEEEAVRLFIEWLKNGGPSCGAPPPS;
(SEQ ID NO: 286)
HGEGTFTSDLSKQMEEEAVRLFIEWLKNGGPCSGAPPPS;
(SEQ ID NO: 287)
HGEGTFTSDLSKQMEEEAVRLFIEWLKNGCPSSGAPPPS;
(SEQ ID NO: 288)
HGEGTFTSDLSKQMEEEAVRLFIEWLKNCGPSSGAPPPS;
(SEQ ID NO: 289)
HGEGTFTSDLSKQMEEEAVRLFIEWLKCGGPSSGAPPPS;
(SEQ ID NO: 188)
HGEGTFTSDLSKQMEEEAVRLFIEWLCNGGPSSGAPPPS;
(SEQ ID NO: 291)
HGEGTFTSDLSKQMEEEAVRLFIECLKNGGPSSGAPPPS;
(SEQ ID NO: 292)
HGEGTFTSDLSKQMEEEAVCLFIEWLKNGGPSSGAPPPS;
(SEQ ID NO: 293)
HGEGTFTSDLSKQCEEEAVRLFIEWLKNGGPSSGAPPPS;
(SEQ ID NO: 294)
HGEGTFTSDLSCQMEEEAVRLFIEWLKNGGPSSGAPPPS;
(SEQ ID NO: 295)
HGEGTFTSDCSKQMEEEAVRLFIEWLKNGGPSSGAPPPS;
(SEQ ID NO: 296)
HGEGTFTSDLSKQMEEEAVRLFIEWLKNGGC.

[0280] The GLP-1 receptor binding polypeptide is linked to the interleukin-1 receptor antagonistic protein by reacting the mercapto group on the side chain of a cysteine with the maleimide or iodoacetyl on the linking group.

[0281] In one embodiment, the sequence of the GLP-1 receptor binding polypeptide may be

(SEQ ID NO: 297)
X_{E1}X_{E2}EGTFTSDX_{E10}SX_{E12}QX_{E14}EEEAVX_{E20}LFIEWLX_{E27}X_{E28}
X_{E29}X_{E30}(PX_{E32}X_{E33}GX_{E35}PPPK)ₜ₂;
(SEQ ID NO: 298)
X_{E1}X_{E2}EGTFTSDX_{E10}SX_{E12}QX_{E14}EEEAVX_{E20}LFIEWLX_{E27}X_{E28}
X_{E29}X_{E30}(PX_{E32}X_{E33}GKPPPX_{E39})ₜ₂;
(SEQ ID NO: 299)
X_{E1}X_{E2}EGTFTSDX_{E10}SX_{E12}QX_{E14}EEEAVX_{E20}LFIEWLX_{E27}X_{E28}
X_{E29}X_{E30}(PX_{E32}KGX_{E35}PPPX_{E39})ₜ₂;
(SEQ ID NO: 300)
X_{E1}X_{E2}EGTFTSDX_{E10}SX_{E12}QX_{E14}EEEAVX_{E20}LFIEWLX_{E27}X_{E28}
X_{E29}X_{E30}(PKX_{E33}GX_{E35}PPPX_{E39})ₜ₂;
(SEQ ID NO: 301)
X_{E1}X_{E2}EGTFTSDX_{E10}SX_{E12}QX_{E14}EEEAVX_{E20}LFIEWLX_{E27}X_{E28}
X_{E29}K(PX_{E32}X_{E33}GX_{E35}PPPX_{E39})ₜ₂;
(SEQ ID NO: 302)
X_{E1}X_{E2}EGTFTSDX_{E10}SX_{E12}QX_{E14}EEEAVX_{E20}LFIEWLX_{E27}X_{E28}
KX_{E30}(PX_{E32}X_{E33}GX_{E35}PPPX_{E39})ₜ₂;
(SEQ ID NO: 303)
X_{E1}X_{E2}EGTFTSDX_{E10}SX_{E12}QX_{E14}EEEAVX_{E20}LFIEWLX_{E27}K
X_{E29}X_{E30}(PX_{E32}X_{E33}GX_{E35}PPPX_{E39})ₜ₂;
(SEQ ID NO: 304)
X_{E1}X_{E2}EGTFTSDX_{E10}SX_{E12}QX_{E14}EEEAVX_{E20}LFIEWLKX_{E28}
X_{E29}X_{E30}(PX_{E32}X_{E33}GX_{E35}PPPX_{E39})ₜ₂;
(SEQ ID NO: 305)
X_{E1}X_{E2}EGTFTSDX_{E10}SX_{E12}QX_{E14}EEEAVKLFIEWLX_{E27}X_{E28}
X_{E29}X_{E30}(PX_{E32}X_{E33}GX_{E35}PPPX_{E39})ₜ₂;
(SEQ ID NO: 306)
X_{E1}X_{E2}EGTFTSDX_{E10}SX_{E12}QKEEEAVX_{E20}LFIEWLX_{E27}X_{E28}
X_{E29}X_{E30}(PX_{E32}X_{E33}GX_{E35}PPPX_{E39})ₜ₂;
(SEQ ID NO: 307)
X_{E1}X_{E2}EGTFTSDX_{E10}SKQXEHEEEAVX_{E20}LFIEWLX_{E27}X_{E28}
X_{E29}X_{E30}(PX_{E32}X_{E33}GX_{E35}PPPX_{E39})ₜ₂;
(SEQ ID NO: 308)
X_{E1}X_{E2}EGTFTSDKSX_{E12}QX_{E14}EEEAVX_{E20}LFIEWLX_{E27}X_{E28}
X_{E29}X_{E30}(PX_{E32}X_{E33}GX_{E35}PPPX_{E39})ₜ₂;

the variables in the individual sequences are individually defined as the above.

[0282] In one particular embodiment, the sequence of the GLP-1 receptor binding polypeptide may be one of the following sequences:

(SEQ ID NO: 309)
HGEGTFTSDLSRQMEEEAVRLFIEWLRNGGPSSGAPPPSK;
(SEQ ID NO: 310)
HGEGTFTSDLSRQMEEEAVRLFIEWLRNGGPSSGAPPPK;
(SEQ ID NO: 311)
HGEGTFTSDLSRQMEEEAVRLFIEWLRNGGPSSGKPPPS;
(SEQ ID NO: 312)
HGEGTFTSDLSRQMEEEAVRLFIEWLRNGGPSKGAPPPS;
(SEQ ID NO: 313)
HGEGTFTSDLSRQMEEEAVRLFIEWLRNGGPKSGAPPPS;
(SEQ ID NO: 314)
HGEGTFTSDLSRQMEEEAVRLFIEWLRNGKPSSGAPPPS;
(SEQ ID NO: 315)
HGEGTFTSDLSRQMEEEAVRLFIEWLRNKGPSSGAPPPS;
(SEQ ID NO: 316)
HGEGTFTSDLSRQMEEEAVRLFIEWLRKGGPSSGAPPPS;
(SEQ ID NO: 317)
HGEGTFTSDLSRQMEEEAVRLFIEWLKNGGPSSGAPPPS;
(SEQ ID NO: 318)
HGEGTFTSDLSRQMEEEAVRLFIEKLRNGGPSSGAPPPS;
(SEQ ID NO: 319)
HGEGTFTSDLSRQMEEEAVKLFIEWLRNGGPSSGAPPPS;
(SEQ ID NO: 320)
HGEGTFTSDLSRQKEEEAVRLFIEWLRNGGPSSGAPPPS;
(SEQ ID NO: 321)
HGEGTFTSDLSKQMEEEAVRLFIEWLRNGGPSSGAPPPS;
(SEQ ID NO: 322)
HGEGTFTSDKSRQMEEEAVRLFIEWLRNGGPSSGAPPPS;
(SEQ ID NO: 323)
HGEGTFTSDLSRQMEEEAVRLFIEWLRNGK-NH₂.

[0283] The GLP-1 receptor binding polypeptide is reacted with the N-hydroxyl succinimidyl ester of the linking group through the amino group on the side chain of a lysine, thus linking to the interleukin-1 receptor antagonistic protein.

[0284] In one embodiment, the sequence of the GLP-1 receptor binding polypeptide may be

(SEQ ID NO: 324)
X_{G1}X_{G2}EGTFTSDX_{G10}SX_{G12}YLEX_{G16}QAAX_{G20}EFIAWLVX_{G28}
X_{G29}X_{G30}(PX_{E32}X_{E33}GX_{E35}PPPC)ₜ₂;
(SEQ ID NO: 325)
X_{G1}X_{G2}EGTFTSDX_{G10}SX_{G12}YLEX_{G16}QAAX_{G20}EFIAWLVX_{G28}
X_{G29}X_{G30}(PX_{E32}X_{E33}GCPPPX_{E39})ₜ₂;
(SEQ ID NO: 326)
X_{G1}X_{G2}EGTFTSDX_{G10}SX_{G12}YLEX_{G16}QAAX_{G20}EFIAWLVX_{G28}
X_{G29}X_{G30}(PX_{E32}CGX_{E35}PPPX_{E39})ₜ₂;
(SEQ ID NO: 327)
X_{G1}X_{G2}EGTFTSDX_{G10}SX_{G12}YLEX_{G16}QAAX_{G20}EFIAWLVX_{G28}
X_{G29}X_{G30}(PCX_{E33}GX_{E35}PPPX_{E39})ₜ₂;
(SEQ ID NO: 328)
X_{G1}X_{G2}EGTFTSDX_{G10}SX_{G12}YLEX_{G16}QAAX_{G20}EFIAWLVX_{G28}
X_{G29}X_{G30}C;
(SEQ ID NO: 329)
X_{G1}X_{G2}EGTFTSDX_{G10}SX_{G12}YLEX_{G16}QAAX_{G20}EFIAWLVX_{G28}
X_{G29}C-NH₂;
(SEQ ID NO: 330)
X_{G1}X_{G2}EGTFTSDX_{G10}SX_{G12}YLEX_{G16}QAAX_{G20}EFIAWLVX_{G28}
CX_{G30}X_{G31};
(SEQ ID NO: 331)
X_{G1}X_{G2}EGTFTSDX_{G10}SX_{G12}YLEX_{G16}QAAX_{G20}EFIAWLVCX_{G29}
X_{G30}X_{G31};
(SEQ ID NO: 332)
X_{G1}X_{G2}EGTFTSDX_{G10}SX_{G12}YLEX_{G16}QAAX_{G20}EFIACLVX_{G28}
X_{G29}X_{G30}X_{G31};
(SEQ ID NO: 333)
X_{G1}X_{G2}EGTFTSDX_{G10}SX_{G12}YLEX_{G16}QAACEFIAWLVX_{G28}X_{G29}
X_{G30}X_{G31};
(SEQ ID NO: 334)
X_{G1}X_{G2}EGTFTSDX_{G10}SCYLEX_{G16}QAAX_{G20}EFIAWLVX_{G28}X_{G29}
X_{G30}X_{G31};
(SEQ ID NO: 335)
X_{G1}X_{G2}EGTFTSDCSX_{G12}YLEX_{G16}QAAX_{G20}EFIAWLVX_{G28}X_{G29}
X_{G30}X_{G31};

[0285] the variables in the individual sequences are individually defined as the above.

[0286] In one particular embodiment, the sequence of the GLP-1 receptor binding polypeptide may be one of the following sequences:

(SEQ ID NO: 336)
HX_{G2}EGTFTSDVSSYLEX_{G16}QAAKEFIAWLVKGRPSSGAPPPC;
(SEQ ID NO: 337)
HX_{G2}EGTFTSDVSSYLEX_{G16}QAAKEFIAWLVKGRPSSGCPPPS;
(SEQ ID NO: 338)
HX_{G2}EGTFTSDVSSYLEX_{G16}QAAKEFIAWLVKGRPSCGAPPPS;
(SEQ ID NO: 339)
HX_{G2}EGTFTSDVSSYLEX_{G16}QAAKEFIAWLVKGRPCSGAPPPS;
(SEQ ID NO: 340)
HX_{G2}EGTFTSDVSSYLEX_{G16}QAAKEFIAWLVKGRC;
(SEQ ID NO: 341)
HX_{G2}EGTFTSDVSSYLEX_{G16}QAAKEFIAWLVKGC-NH₂;
(SEQ ID NO: 342)
HX_{G2}EGTFTSDVSSYLEX_{G16}QAAKEFIAWLVKCRG;
(SEQ ID NO: 343)
HX_{G2}EGTFTSDVSSYLEX_{G16}QAAKEFIAWLVCGRG;
(SEQ ID NO: 344)
HX_{G2}EGTFTSDVSSYLEX_{G16}QAAKEFIAWLVCGR-NH₂;
(SEQ ID NO: 345)
HX_{G2}EGTFTSDVSSYLEX_{G16}QAAKEFIACLVKGRG;
(SEQ ID NO: 346)
HX_{G2}EGTFTSDVSSYLEX_{G16}QAACEFIAWLVKGRG;
(SEQ ID NO: 347)
HX_{G2}EGTFTSDVSSYLEX_{G16}QAACEFIAWLVKGR-NH₂;
(SEQ ID NO: 348)
HX_{G2}EGTFTSDVSCYLEX_{G16}QAAKEFIAWLVKGRG;
(SEQ ID NO: 349)
HX_{G2}EGTFTSDCSSYLEX_{G16}QAAKEFIAWLVKGRG;
(SEQ ID NO: 350)
HX_{G2}EGTFTSDCSSYLEX_{G16}QAAKEFIAWLVKGR-NH₂;

[0287] the variables in the individual sequences are individually defined as the above.

[0288] The polypeptide is linked to the interleukin-1 receptor antagonistic protein by reacting the mercapto group on the side chain of a cysteine with the maleimide or iodoacetyl on one terminus of the linking group.

[0289] In one embodiment, the sequence of the GLP-1 receptor binding polypeptide may be:

(SEQ ID NO: 351)
X_{G1}X_{G2}EGTFTSDX_{G10}SX_{G12}YLEX_{G16}QAAX_{G20}EFIAWLVX_{G28}
X_{G29}X_{G30}(PX_{E32}X_{E33}GX_{E35}PPPK)ₜ₂;
(SEQ ID NO: 352)
X_{G1}X_{G2}EGTFTSDX_{G10}SX_{G12}YLEX_{G16}QAAX_{G20}EFIAWLVX_{G28}
X_{G29}X_{G30}(PX_{E32}X_{E33}GKPPPX_{E39})ₜ₂;
(SEQ ID NO: 353)
X_{G1}X_{G2}EGTFTSDX_{G10}SX_{G12}YLEX_{G16}QAAX_{G20}EFIAWLVX_{G28}
X_{G29}X_{G30}(PX_{E32}KGX_{E35}PPPX_{E39})ₜ₂;
(SEQ ID NO: 354)
X_{G1}X_{G2}EGTFTSDX_{G10}SX_{G12}YLEX_{G16}QAAX_{G20}EFIAWLVX_{G28}
X_{G29}X_{G30}(PKX_{E33}GX_{E35}PPPX_{E39})ₜ₂;
(SEQ ID NO: 355)
X_{G1}X_{G2}EGTFTSDX_{G10}SX_{G12}YLEX_{G16}QAAX_{G20}EFIAWLVX_{G28}
X_{G29}X_{G30}K;
(SEQ ID NO: 356)
X_{G1}X_{G2}EGTFTSDX_{G10}SX_{G12}YLEX_{G16}QAAX_{G20}EFIAWLVX_{G28}
X_{G29}K-NH₂;
(SEQ ID NO: 357)
X_{G1}X_{G2}EGTFTSDX_{G10}SX_{G12}YLEX_{G16}QAAX_{G20}EFIAWLVX_{G28}
KX_{G30}X_{G31};
(SEQ ID NO: 358)
X_{G1}X_{G2}EGTFTSDX_{G10}SX_{G12}YLEX_{G16}QAAX_{G20}EFIAWLVK X_{G29}
X_{G30}X_{G31};
(SEQ ID NO: 359)
X_{G1}X_{G2}EGTFTSDX_{G10}SX_{G12}YLEX_{G16}QAAX_{G20}EFIAKLVX_{G28}
X_{G29}X_{G30}X_{G31};
(SEQ ID NO: 360)
X_{G1}X_{G2}EGTFTSDX_{G10}SX_{G12}YLEX_{G16}QAAKEFIAWLVX_{G28} X_{G29}
X_{G30}X_{G31};
(SEQ ID NO: 361)
X_{G1}X_{G2}EGTFTSDX_{G10}SKYLEX_{G16}QAAX_{G20}EFIAWLVX_{G28}X_{G29}
X_{G30}X_{G31};
(SEQ ID NO: 362)
X_{G1}X_{G2}EGTFTSDKSX_{G12}YLEX_{G16}QAAX_{G20}EFIAWLVX_{G28}X_{G29}
X_{G30}X_{G31};

and

[0290] the variables in the individual sequences are individually defined as the above.

[0291] In one particular embodiment, the sequence of the GLP-1 receptor binding polypeptide may be one of the following sequences:

(SEQ ID NO: 363)
HX_{G2}EGTFTSDVSSYLEX_{G16}QAAREFIAWLVRGRPSSGAPPPK;
(SEQ ID NO: 364)
HX_{G2}EGTFTSDVSSYLEX_{G16}QAAREFIAWLVRGRPSSGKPPPS;
(SEQ ID NO: 365)
HX_{G2}EGTFTSDVSSYLEX_{G16}QAAREFIAWLVRGRPSKGAPPPS;
(SEQ ID NO: 366)
HX_{G2}EGTFTSDVSSYLEX_{G16}QAAREFIAWLVRGRPKSGAPPPS;
(SEQ ID NO: 367)
HX_{G2}EGTFTSDVSSYLEX_{G16}QAAREFIAWLVRGRK;
(SEQ ID NO: 368)
HX_{G2}EGTFTSDVSSYLEX_{G16}QAAREFIAWLVRGK-NH₂;
(SEQ ID NO: 369)
HX_{G2}EGTFTSDVSSYLEX_{G16}QAAREFIAWLVRKRG;
(SEQ ID NO: 370)
HX_{G2}EGTFTSDVSSYLEX_{G16}QAAREFIAWLVKGRG;
(SEQ ID NO: 371)
HX_{G2}EGTFTSDVSSYLEX_{G16}QAAREFIAKLVRGRG;
(SEQ ID NO: 372)
HX_{G2}EGTFTSDVSSYLEX_{G16}QAAKEFIAWLVRGRG;
(SEQ ID NO: 373)
HX_{G2}EGTFTSDVSSYLEX_{G16}QAAKEFIAWLVRGR-NH₂;
(SEQ ID NO: 374)
HX_{G2}EGTFTSDVSKYLEX_{G16}QAAREFIAWLVRGRG;
(SEQ ID NO: 375)
HX_{G2}EGTFTSDKSSYLEX_{G16}QAAREFIAWLVRGRG;
and
(SEQ ID NO: 376)
HX_{G2}EGTFTSDKSSYLEX_{G16}QAAREFIAWLVRGR-NH₂;

[0292] the variables in the individual sequences are individually defined as the above.

[0293] The GLP-1 receptor binding polypeptide is reacted with the N-hydroxyl succinimidyl ester of the linking group through the amino group on the side chain of a lysine, thus linking to the interleukin-1 receptor antagonistic protein.

[0294] In one embodiment, the sequence of the fusion protein is

(SEQ ID NO: 377)
(GLP-1 receptor binding polypeptide - linking
group)-C_{IL0}-X_{IL0}RPSGRKSSKMQAFRIWDVNQKTFYLRNNQLVAGY
LQGPNVNLEEKIDVVPIEPHALFLGIHGGKMX_{IL66}LSX_{IL69}VKSGDET
RLQLEAVX_{IL84}ITDLSENRKQDKRFAFIRSDSGPTTSFESAAX_{IL116}P
GWFLX_{IL122}TAMEADQPVSLTNMPDEGVMVTKEYFQEDE;
or
(SEQ ID NO: 378)
C_{IL0}(linking group - GLP-1 receptor binding poly-
peptide)
X_{IL0}RPSGRKSSKMQAFRIWDVNQKTFYLRNN-QLVAGYLQGPNVNLEEK
IDVVPIEPHALFLGIHGGKMCLSCVKSGDETRLQLEAVNITDLSENRKQD
KRFAFIRSDSGPTTSPESAAX_{IL116}PGWFLCTAMEADQPVSLTNMPDEG
VMVTKFYFQEDE;
or
(SEQ ID NO: 379)
U_{L}-X_{IL0}RPSGRKSSKMQAFRIWDVNQKTFYLRNNQLVAGYLQGPNVNLE
EKIDVVPIEPHALFLGIHGGKMX_{IL66}LSX_{IL69}VKSGDETRLQLEAV
X_{IL84}ITDLSENRKQDKRFAFIRSDSGPTTSFESAAX_{IL116}PGWFL
X_{IL122}TAMEADQPVSLTNMPDEGVMVTKFYFQEDEC_{IL153}
(linking group - GLP-1 receptor binding
polypeptide);

wherein

[0295] C_{IL0} and C_{IL153} are cysteines or absent and other variables are respectively defined as the above. The linking group is defined as herein. In one embodiment, the linking group has an aldehyde group and is linked to the N-terminus of the interleukin-1 receptor antagonistic protein through reductive amination; in another embodiment, C_{IL0} cysteine is linked to the linking group via the mercapto group on the side chain, and then is linked to the GLP-1 receptor binding polypeptide.

[0296] The GLP-1 receptor binding polypeptide may typically react with the linking group through the amino or mercapto group on the side chain of an amino acid residue.

[0297] In one embodiment, the GLP-1 receptor binding polypeptide is a modified conjugate. The sequences of the fusion protein/dimeric protein/cross-linking protein of the GLP-1 receptor binding polypeptide and the interleukin-1 receptor antagonistic protein are selected from:

G-1:
(SEQ ID NO: 1)
HGEGTFTSDLSKQMEEEAVRLFIEWLKNGGPSSGAPPPSRPSGRKSSKMQAFRIWDVNQ
KTFYLRNNQLVAGYLQGPNVNLEEKIDVVPIEPHALFLGIHGGKMCLSCVKSGDETRLQ
LEAVNITDLSENRKQDKRFAFIRSDSGPTTSFESAACPGWFLCTAMEADQPVSLTNMPDE
GVMVTKFYFQEDE;
G-2:
(SEQ ID NO: 2)
HGEGTFTSDLSKQMEEEAVRLFIEWLKNGGPSSGAPPPSGGGGSRPSGRKSSKMQAFRI
WDVNQKTFYLRNNQLVAGYLQGPNVNLEEKIDVVPIEPHALFLGIHGGKMCLSCVKSG
DETRLQLEAVNITDLSENRKQDKRFAFIRSDSGPTTSFESAACPGWFLCTAMEADQPVSL
TNMPDEGVMVTKFYFQEDE;
G-3:
(SEQ ID NO: 3)
HGEGTFTSDLSKQMEEEAVRLFIEWLKNGGPSSGAPPPSGGGGSGGGGSRPSGRKSSKM
QAFRIWDVNQKTFYLRNNQLVAGYLQGPNVNLEEKIDVVPIEPHALFLGIHGGKMCLSC
VKSGDETRLQLEAVNITDLSENRKQDKRFAFIRSDSGPTTSFESAACPGWFLCTAMEADQ
PVSLTNMPDEGVMVTKFYFQEDE;
G-4:
(SEQ ID NO: 4)
HGEGTFTSDLSKQMEEEAVRLFIEWLKNGGPSSGAPPPSGGGGSGGGGSGGGGSRPSGR
KSSKMQAFRIWDVNQKTFYLRNNQLVAGYLQGPNVNLEEKIDVVPIEPHALFLGIHGGK
MCLSCVKSGDETRLQLEAVNITDLSENRKQDKRFAFIRSDSGPTTSFESAACPGWFLCTA
MEADQPVSLTNMPDEGVMVTKFYFQEDE;
G-5:
(SEQ ID NO: 5)
HGEGTFTSDLSKQMEEEAVRLFIEWLKNGGRPSGRKSSKMQAFRIWDVNQKTFYLRNN
QLVAGYLQGPNVNLEEKIDVVPIEPHALFLGIHGGKMCLSCVKSGDETRLQLEAVNITDL
SENRKQDKRFAFIRSDSGPTTSFESAACPGWFLCTAMEADQPVSLTNMPDEGVMVTKFY
FQEDE;
G-6:
(SEQ ID NO: 6)
HGEGTFTSDLSKQMEEEAVRLFIEWLKNGGGGSRPSGRKSSKMQAFRIWDVNQKTFYL
RNNQLVAGYLQGPNVNLEEKIDVVPIEPHALFLGIHGGKMCLSCVKSGDETRLQLEAVNI
TDLSENRKQDKRFAFIRSDSGPTTSFESAACPGWFLCTAMEADQPVSLTNMPDEGVMVT
KFYFQEDE;
G-7:
(SEQ ID NO: 7)
HGEGTFTSDLSKQMEEEAVRLFIEWLKNGGGGSGGGGSRPSGRKSSKMQAFRIWDVNQ
KTFYLRNNQLVAGYLQGPNVNLEEKIDVVPIEPHALFLGIHGGKMCLSCVKSGDETRLQ
LEAVNITDLSENRKQDKRFAFIRSDSGPTTSFESAACPGWFLCTAMEADQPVSLTNMPDE
GVMVTKFYFQEDE;
G-8:
(SEQ ID NO: 8)
HGEGTFTSDLSKQMEEEAVRLFIEWLKNGGGGSGGGGSGGGGSRPSGRKSSKMQAFRI
WDVNQKTFYLRNNQLVAGYLQGPNVNLEEKIDVVPIEPHALFLGIHGGKMCLSCVKSG
DETRLQLEAVNITDLSENRKQDKRFAFIRSDSGPTTSFESAACPGWFLCTAMEADQPVSL
TNMPDEGVMVTKFYFQEDE;
G-9:
(SEQ ID NO: 9)
HGEGTFTSDLSKQMEEEAVRLFIEWLKNGGPSSGAPPPSGGGGSRPSGRKSSKMQAFRI
WDVNQKTFYLRNNQLVAGYLQGPNVNLEEKIDVVPIEPHALFLGIHGGKMCLSCVKSG
DETRLQLEAVNITDLSENRKQDKRFAFIRSDSGPTTSFESAAC[S-maleimide-(CH₂)₄-NH-(N^{α}-
(HOOC(CH₂)₁₄CO)-γ-Glu)]PGWFLCTAMEADQPVSLTNMPDEGVMVTKFYFQEDE(S is
the sulphur atom on the side chain of a cysteine residue);
G-10:
(SEQ ID NO: 10)
HGEGTFTSDLSKQMEEEAVRLFIEWLKNGGPSSGAPPPSGGGGSRPSGRKSSKMQAFRI
WDVNQKTFYLRNNQLVAGYLQGPNVNLEEKIDVVPIEPHALFLGIHGGKMCLSCVKSG
DETRLQLEAVC(S-CH₂-CONH-PEG20K)ITDLSENRKQDKRFAFIRSDSGPTTSFESAASPG
WFLCTAMEADQPVSLTNMPDEGVMVTKFYFQEDE(Sis the sulphur atom on the side chain
of a cysteine residue);
G-11:
(SEQ ID NO: 11)
HGEGTFTSDLSKQMEEEAVRLFIEWLKNGGGGGSGGGGSRPSGRKSSKMQAFRIWDVN
QKTFYLRNNQLVAGYLQGPNVNLEEKIDVVPIEPHALFLGIHGGKMCLSCVKSGDETRL
QLEAVNITDLSENRKQDKRFAFIRSDSGPTTSFESAAC(S-CH₂-CONH-PEG20K)PGWF
LCTA MEADQPVSLTNMPDEGVMVTKFYFQEDE(S is the sulphur atom on the side chain of
a cysteine residue);
G-12:
(SEQ ID NO: 12)
HGEGTFTSDLSKQMEEEAVRLFIEWLKNGGPSSGAPPPSGGGGSGGGGSRPSGRKSSKM
QAFRIWDVNQKTFYLRNNQLVAGYLQGPNVNLEEKIDVVPIEPHALFLGIHGGKMCLSC
VKSGDETRLQLEAVC[S-maleimide-(CH₂)₄-NH-(N^{α}-(HOOC(CH₂)₁₄CO)-γ-Glu)]ITDLSENRK
QDKRFAFIRSDSGPTTSFESAASPGWFLCTAMEADQPVSLTNMPDEGVMVTKFYFQEDE
(S is the sulphur atom on the side chain of a cysteine residue);
G-13:
(SEQ ID NO: 13)
HGEGTFTSDLSKQMEEEAVRLFIEWLKNGGGGSRPSGRKSSKMQAFRIWDVNQKTFYL
RNNQLVAGYLQGPNVNLEEKIDVVPIEPHALFLGIHGGKMCLSCVKSGDETRLQLEAVNI
TDLSENRKQDKRFAFIRSDSGPTTSFESAAC(S-maleimide-PEG20K)PGWFLCTAMEAD
QPVSLTNMPDEGVMVTKFYFQEDE(S is the sulphur atom on the side chain of a cysteine
residue);
G-14:
(SEQ ID NO: 14)
HGEGTFTSDLSKQMEEEAVRLFIEWLKNGGGGSRPSGRKSSKMQAFRIWDVNQKTFYL
RNNQLVAGYLQGPNVNLEEKIDVVPIEPHALFLGIHGGKMCLSCVKSGDETRLQLEAVC
[S-maleimide-(CH₂)₄-NH-(N^{α}-(HOOC(CH₂)₁₄CO)-γ-Glu)]ITDLSENRKQDKRFAFIRS
DSGPTTSFESAASPGWFLCTAME ADQPVSLTNMPDEGVMVTKFYFQEDE(S is the
sulphur atom on the side chain of a cysteine residue);
G-15:
(SEQ ID NO: 15)
HGEGTFTSDLSKQMEEEAVRLFIEWLC[S-maleimide-(CH₂)₄-NH-(N^{α}-(HOOC(CH₂)₁₄CO)-
γ-Glu)]NGGPSSGAPPPSGGGGSGGGGSRPSGRKSSKMQAFRIWDVNQKTFYLRNNQLV
AGYLQGPNVNLEEKIDVVPIEPHALFLGIHGGKMCLSCVKSGDETRLQLEAVNITDLSEN
RKQDKRFAFIRSDSGPTTSFESAASPGWFLCTAMEADQPVSLTNMPDEGVMVTKFYFQE
DE(S is the sulphur atom on the side chain of a cysteine residue);
G-16:
(SEQ ID NO: 16)
HGEGTFTSDLSKQMEEEAVRLFIEWLKNGGPSSGAPPPC(S-CH₂-CONH-PEG20K)GGGG
SGGGGSRPSGRKSSKMQAFRIWDVNQKTFYLRNNQLVAGYLQGPNVNLEEKIDVVPIEP
HALFLGIHGGKMCLSCVKSGDETRLQLEAVNITDLSENRKQDKRFAFIRSDSGPTTSFESA
ASPGWFLCTAMEADQPVSLTNMPDEGVMVTKFYFQEDE(S is the sulphur atom on the
side chain of a cysteine residue);
G-17:
(SEQ ID NO: 17)
HGEGTFTSDLSKQMEEEAVC[S-maleimide-(CH₂)₄-NH-(N^{α}-(HOOC(CH₂)₁₄CO)-γ-Glu)]
LFIEWLKNGGPSSGAPPPSGGGGSGGGGSRPSGRKSSKMQAERIWDVNQKTFYLRNNQL
VAGYLQGPNVNLEEKIDVVPIEPHALFLGIHGGKMCLSCVKSGDETRLQLEAVNITDLSE
NRKQDKRFAFIRSDSGPTTSFESAASPGWFLCTAMEADQPVSLTNMPDEGVMVTKFYFQ
EDE(S is the sulphur atom on the side chain of a cysteine residue);
G-18:
(SEQ ID NO: 18)
HGEGTFTSDVSSYLEEQAAKEFIAWLVKGRGRPSGRKSSKMQAFRIWDVNQKTFYLRN
NQLVAGYLQGPNVNLEEKIDVVPIEPHALFLGIHGGKMCLSCVKSGDETRLQLEAVNITD
LSENRKQDKRFAFIRSDSGPTTSFESAACPGWFLCTAMEADQPVSLTNMPDEGVMVTKF
YFQEDE;
G-19:
(SEQ ID NO: 19)
HGEGTFTSDVSSYLEEQAAKEFIAWLVKGRGGGGSRPSGRKSSKMQAFRIWDVNQKTF
YLRNNQLVAGYLQGPNVNLEEKIDVVPIEPHALFLGIHGGKMCLSCVKSGDETRLQLEA
VNITDLSENRKQDKRFAFIRSDSGPTTSFESAACPGWFLCTAMEADQPVSLTNMPDEGV
MVTKFYFQEDE;
G-20:
(SEQ ID NO: 20)
HGEGTFTSDVSSYLEEQAAKEFIAWLVKGRGGGGSGGGGSRPSGRKSSKMQAPRIWDV
NQKTFYLRNNQLVAGYLQGPNVNLEEKIDVVPIEPHALFLGIHGGKMCLSCVKSGDETR
LQLEAVNITDLSENRKQDKRFAFIRSDSGPTTSFESAACPGWFLCTAMEADQPVSLTNMP
DEGVMVTKFYFQEDE;
G-21:
(SEQ ID NO: 21)
HGEGTFTSDVSSYLEEQAAKEFIAWLVKGRGGGGSGGGGSGGGGSRPSGRKSSKMQAF
RIWDVNQKTFYLRNNQLVAGYLQGPNVNLEEKIDVVPIEPHALFLGIHGGKMCLSCVKS
GDETRLQLEAVNITDLSENRKQDKRFAFIRSDSGPTTSFESAACPGWFLCTAMEADQPVS
LTNMPDEGVMVTKFYFQEDE;
G-22:
(SEQ ID NO: 22)
HGEGTFTSDVSSYLEEQAAKEFIAWLVKGRPSSGAPPPSGGGGSGGGGSRPSGRKSSKM
QAFRIWDVNQKTFYLRNNQLVAGYLQGPNVNLEEKIDVVPIEPHALFLGIHGGKMCLSC
VKSGDETRLQLEAVNITDLSENRKQDKRFAFIRSDSGPTTSFESAACPGWFLCTAMEADQ
PVSLTNMPDEGVMVTKFYFQEDE;
G-23:
(SEQ ID NO: 23)
HGEGTFTSDVSSYLEEQAAKEFIAWLVKGRGRPSGRKSSKMQAFRIWDVNQKTFYLRN
NQLVAGYLQGPNVNLEEKIDVVPIEPHALFLGIHGGKMCLSCVKSGDETRLQLEAVNITD
LSENRKQDKRFAFIRSDSGPTTSFESAAC(S-CH₂-CONH-PEG20K)PGWFLCTAMEADQPV
SLTNMPDEGVMVTKFYFQEDE(S is the sulphur atom on the side chain of a cysteine residue);
G-24:
(SEQ ID NO: 24)
HGEGTFTSDVSSYLEEQAAKEFIAWLVKGRGGGGSRPSGRKSSKMQAFRIWDVNQKTF
YLRNNQLVAGYLQGPNVNLEEKIDVVPIEPHALFLGIHGGKMCLSCVKSGDETRLQLEA
VNITDLSENRKQDKRFAFIRSDSGPTTSFESAAC(S-CH₂-CONH-PEG20K)PGWFLCTAME
ADQPVSLTNMPDEGVMVTKFYFQEDE(S is the sulphur atom on the side chain of a cysteine
residue);
G-25:
(SEQ ID NO: 25)
HGEGTFTSDVSSYLEEQAAKEFIAWLVKGRGGGGSRPSGRKSSKMQAFRIWDVNQKTF
YLRNNQLVAGYLQGPNVNLEEKIDVVPIEPHALFLGIHGGKMCLSCVKSGDETRLQLEA
VC[S-maleimide-(CH₂)₄-NH-(N^{α}-(HOOC(CH₂)₁₄CO)-γ-Glu)]ITDLSENRKQDKRFAFIRS
DSGPTTSFESAASPGWFLCTAME ADQPVSLTNMPDEGVMVTKFYFQEDE(S is the
sulphur atom on the side chain of a cysteine residue);
G-26:
(SEQ ID NO: 26)
HGEGTFTSDVSSYLEEQAAKEFIAWLVKGRGGGGSGGGGSRPSGRKSSKMQAPRIWDV
NQKTFYLRNNQLVAGYLQGPNVNLEEKIDVVPIEPHALFLGIHGGKMCLSCVKSGDETR
LQLEAVNITDLSENRKQDKRFAFIRSDSGPTTSFESAAC(S-CH₂-CONH-PEG20K)PGWFLC
TAMEADQPVSLTNMPDEGVMVTKFYFQEDE(S is the sulphur atom on the side chain of a
cysteine residue);
G-27:
(SEQ ID NO: 27)
HGEGTFTSDVSSYLEEQAAKEFIAWLVKGRGGGGSGGGGSRPSGRKSSKMQAPRIWDV
NQKTFYLRNNQLVAGYLQGPNVNLEEKIDVVPIEPHALFLGIHGGKMCLSCVKSGDETR
LQLEAVC[S-maleimide-(CH₂)₄-NH-(N^{α}-(HOOC(CH₂)₁₄CO)-γ-Glu)]ITDLSENRKQDKR
FAFIRSDSGPTTSFESAASPGWFLCTAMEADQPVSLTNMPDEGVMVTKFYFQEDE(S is
the sulphur atom on the side chain of a cysteine residue);
G-28:
(SEQ ID NO: 28)
HGEGTFTSDVSSYLEEQAAKEFIAWLVKGRGGGGSGGGGSGGGGSRPSGRKSSKMQAF
RIWDVNQKTFYLRNNQLVAGYLQGPNVNLEEKIDVVPIEPHALFLGIHGGKMCLSCVKS
GDETRLQLEAVNITDLSENRKQDKRFAFIRSDSGPTTSFESAAC(S-CH₂-CONH-PEG20K)P
GWFLCTAMEADQPVSLTNMPDEGVMVTKFYFQEDE(S is the sulphur atom on the side
chain of a cysteine residue);
G-29:
(SEQ ID NO: 29)
HGEGTFTSDVSSYLEEQAAKEFIAWLVKGRPSSGAPPPSGGGGSGGGGSRPSGRKSSKM
QAFRIWDVNQKTFYLRNNQLVAGYLQGPNVNLEEKIDVVPIEPHALFLGIHGGKMCLSC
VKSGDETRLQLEAVNITDLSENRKQDKRFAFIRSDSGPTTSFESAAC[S-maleimide-(CH₂)₄-
NH-(N^{α}-(HOOC(CH₂)₁₄CO)-γ-Glu)]PGWFLCTAMEADQPVSLTNMPDEGVMVTK
FYFQEDE(S is the sulphur atom on the side chain of a cysteine residue);
G-30:
(SEQ ID NO: 30)
HGEGTFTSDLSKQMEEEAVRLFIEWLKNGGPSSGAPPPC(S-maleimide-(CH₂)₁₅-COOH)GG
GGSGGGGSRPSGRKSSKMQAFRIWDVNQKTFYLRNNQLVAGYLQGPNVNLEEKIDVVPI
EPHALFLGIHGGKMCLSCVKSGDETRLQLEAVNITDLSENRKQDKRFAFIRSDSGPTTSFE
SAASPGWFLCTAMEADQPVSLTNMPDEGVMVTKFYFQEDE(S is the sulphur atom on the
side chain of a cysteine residue);
G-31:
(SEQ ID NO: 31)
HGEGTFTSDLSKQMEEEAVRLFIEWLKNGGPSSGAPPPC(S-maleimide-(CH₂)₁₇-COOH)GG
GGSGGGGSRPSGRKSSKMQAFRIWDVNQKTFYLRNNQLVAGYLQGPNVNLEEKIDVVPI
EPHALFLGIHGGKMCLSCVKSGDETRLQLEAVNITDLSENRKQDKRFAFIRSDSGPTTSFE
SAASPGWFLCTAMEADQPVSLTNMPDEGVMVTKFYFQEDE(S is the sulphur atom on the
side chain of a cysteine residue);
G-32:
(SEQ ID NO: 32)
HGEGTFTSDLSKQMEEEAVRLFIEWLKNGGPSSGAPPPC[S-CH₂-CONH-(CH₂CH₂O)₂-(CH₂)₂-
NH-(N^{α}-(HOOC(CH₂)₁₄CO)-γ-Glu)]-GGGGSGGGGSRPSGRKSSKMQAFRIWDVNQKTF
YLRNNQLVAGYLQGPNVNLEEKIDVVPIEPHALFLGIHGGKMCLSCVKSGDETRLQLEA
VNITDLSENRKQDKRFAFIRSDSGPTTSFESAASPGWFLCTAMEADQPVSLTNMPDEGV
MVTKFYFQEDE(S is the sulphur atom on the side chain of a cysteine residue);
G-33:
(SEQ ID NO: 33)
HGEGTFTSDLSKQMEEEAVRLFIEWLC[S-CH₂-CONH-(CH₂CH₂O)₂-(CH₂)₂-NH-(N^{α}-(HOOC
(CH₂)₁₄CO)-γ-Glu)]NGGPSSGAPPPSGGGGSGGGGSRPSGRKSSKMQAFRIWDVNQKTF
YLRNNQLVAGYLQGPNVNLEEKIDVVPIEPHALFLGIHGGKMCLSCVKSGDETRLQLEA
VNITDLSENRKQDKRFAFIRSDSGPTTSFESAASPGWFLCTAMEADQPVSLTNMPDEGV
MVTKFYFQEDE(S is the sulphur atom on the side chain of a cysteine residue);
G-34:
(SEQ ID NO: 34)
HGEGTFTSDLSKQMEEEAVC[S-CH₂-CONH-(CH₂CH₂O)₂-(CH₂)₂-NH-(N^{α}-(HOOC(CH₂)₁₄CO)-
γ-Glu)]LFIEWLKNGGPSSGAPPPSGGGGSGGGGSRPSGRKSSKMQAFRIWDVNQKTF
YLRNNQLVAGYLQGPNVNLEEKIDVVPIEPHALFLGIHGGKMCLSCVKSGDETRLQLEA
VNITDLSENRKQDKRFAFIRSDSGPTTSFESAASPGWFLCTAMEADQPVSLTNMPDEGV
MVTKFYFQEDE(S is the sulphur atom on the side chain of a cysteine residue);
G-35:
(SEQ ID NO: 35)
HGEGTFTSDLSKQMEEEAVRLFIEWLKNGGPC[S-CH₂-CONH-(CH₂CH₂O)₂-(CH₂)₂-NH-
(N^{α}-(HOOC(CH₂)₁₄CO)-γ-Glu)]SGAPPPSGGGGSGGGGSRPSGRKSSKMQAFRIWDVNQKTF
YLRNNQLVAGYLQGPNVNLEEKIDVVPIEPHALFLGIHGGKMCLSCVKSGDETRLQLEA
VNITDLSENRKQDKRFAFIRSDSGPTTSFESAASPGWFLCTAMEADQPVSLTNMPDEGV
MVTKFYFQEDE(S is the sulphur atom on the side chain of a cysteine residue);
G-36:
(SEQ ID NO: 36)
HGEGTFTSDLSKQMEEEAVRLFIEWLKNGGPSSGAPPPSGGGGSGGGGSRPSGRKSSKM
QAFRIWDVNQKTFYLRNNQLVAGYLQGPNVNLEEKIDVVPIEPHALFLGIHGGKMCLSC
VKSGDETRLQLEAVC(S-maleimide-(CH₂)₁₅-COOH)ITDLSENRKQDKRFAFIRSDSGPT
TSFESAASPGWFLCTAMEADQPVSLTNMPDEGVMVTKFYFQEDE(S is the sulphur atom
on the side chain of a cysteine residue);
G-37:
(SEQ ID NO: 37)
HGEGTFTSDLSKQMEEEAVRLFIEWLKNGGPSSGAPPPSGGGGSGGGGSRPSGRKSSKM
QAFRIWDVNQKTFYLRNNQLVAGYLQGPNVNLEEKIDVVPIEPHALFLGIHGGKMCLSC
VKSGDETRLQLEAVC[S-CH₂-CONH-(CH₂CH₂O)₂-(CH₂)₂-NH-(N^{α}-(HOOC(CH₂)₁₄CO)-γ-
Glu)]ITDLSENRKQDKRFAFIRSDSGPTTSFESAASPGWFLCTAMEADQPVSLTNMPDEGVMV
TKFYFQEDE(S is the sulphur atom on the side chain of a cysteine residue);
G-38:
(SEQ ID NO: 38)
HGEGTFTSDLSKQMEEEAVRLFIEWLKNGGPSSGAPPPSGGGGSGGGGSRPSGRKSSKM
QAFRIWDVNQKTFYLRNNQLVAGYLQGPNVNLEEKIDVVPIEPHALFLGIHGGKMCLSC
VKSGDETRLQLEAVNITDLSENRKQDKRFAFIRSDSGPTTSFESAAC(S-maleimide-(CH₂)₁₇-
COOH)-PGWFLCTAMEADQPVSLTNMPDEGVMVTKFYFQEDE(S is the sulphur atom on
the side chain of a cysteine residue);
G-39:
(SEQ ID NO: 39)
HGEGTFTSDLSKQMEEEAVRLFIEWLKNGGPSSGAPPPSGGGGSGGGGSRPSGRKSSKM
QAFRIWDVNQKTFYLRNNQLVAGYLQGPNVNLEEKIDVVPIEPHALFLGIHGGKMCLSC
VKSGDETRLQLEAVNITDLSENRKQDKRFAFIRSDSGPTTSFESAAC[S-CH₂-CONH-(CH₂CH₂O)₄-
(CH₂)₂-NH-(N^{α}-(HOOC(CH₂)₁₆CO)-γ-Glu)]-PGWFLCTAMEADQPVSLTNMPDEGVM
VTKFYFQEDE(S is the sulphur atom on the side chain of a cysteine residue);
G-40:
(SEQ ID NO: 40)
HGEGTFTSDVSSYLEEQAAKEFIAWLVKGRC(S-maleimide-(CH₂)₁₅-COOH)GGGGSGG
GGSRPSGRKSSKMQAFRIWDVNQKTFYLRNNQLVAGYLQGPNVNLEEKIDVVPIEPHAL
FLGIHGGKMCLSCVKSGDETRLQLEAVNITDLSENRKQDKRFAFIRSDSGPTTSFESAASP
GWFLCTAMEADQPVSLTNMPDEGVMVTKFYFQEDE(S is the sulphur atom on the side
chain of a cysteine residue);
G-41:
(SEQ ID NO: 41)
HGEGTFTSDVSSYLEEQAAKEFIAWLVKGRC[S-CH₂-CONH-(CH₂CH₂O)₂-(CH₂)₂-NH-(N^{α}-
(HOOC(CH₂)₁₄CO)-γ-Glu)]GGGGSGGGGSRPSGRKSSKMQAFRIWDVNQKTFYLRNNQLV
AGYLQGPNVNLEEKIDVVPIEPHALFLGIHGGKMCLSCVKSGDETRLQLEAVNITDLSEN
RKQDKRFAFIRSDSGPTTSFESAASPGWFLCTAMEADQPVSLTNMPDEGVMVTKFYFQE
DE(S is the sulphur atom on the side chain of a cysteine residue);
G-42:
(SEQ ID NO: 42)
HGEGTFTSDVSSYLEEQAAKEFIAWLYKGRGGGGSGGGGSRPSGRKSSKMQAERIWDY
NQKTFYLRNNQLVAGYLQGPNVNLEEKIDVVPIEPHALFLGIHGGKMCLSCVKSGDETR
LQLEAVC(S-maleimide-(CH₂)₁₇-COOH)ITDLSENRKQDKRFAFIRSDSGPTTSFESAASPG
WFLCTAMEADQPVSLTNMPDEGVMVTKFYFQEDE(S is the sulphur atom on the side
chain of a cysteine residue);
G-43:
(SEQ ID NO: 43)
HGEGTFTSDVSSYLEEQAAC[S-CH₂-CONH-(CH₂CH₂O)₂-(CH₂)₂-NH-(N^{α}-(HOOC(CH₂)₁₄
CO)-γ-Glu)]EFIAWLYKGRGGGGSGGGGSRPSGRKSSKMQAFRIWDYNQKTFYLRNNQLY
AGYLQGPNVNLEEKIDVVPIEPHALFLGIHGGKMCLSCVKSGDETRLQLEAVNITDLSEN
RKQDKRFAFIRSDSGPTTSFESAASPGWELCTAMEADQPVSLTNMPDEGVMVTKFYFQE
DE(S is the sulphur atom on the side chain of a cysteine residue);
G-44:
(SEQ ID NO: 44)
HAEGTFTSDVSSYLEGQAAC[S-CH₂-CONH-(CH₂CH₂O)₂-(CH₂)₂-NH-(N^{α}-(HOOC(CH₂)₁₄
CO)-γ-Glu)]EFIAWLYKGRGGGGSGGGGSRPSGRKSSKMQAFRIWDYNQKTFYLRNNQLY
AGYLQGPNVNLEEKIDVVPIEPHALFLGIHGGKMCLSCVKSGDETRLQLEAVNITDLSEN
RKQDKRFAFIRSDSGPTTSFESAASPGWFLCTAMEADQPVSLTNMPDEGVMVTKFYFQE
DE(S is the sulphur atom on the side chain of a cysteine residue);
G-45:
(SEQ ID NO: 45)
HGEGTFTSDC[S-CH₂-CONH-(CH₂CH₂O)₂-(CH₂)₂-NH-(N^{α}-(HOOC(CH₂)₁₄CO-γ-Glu-N-γ-Glu)]
SSYLEEQAAKEFIAWLYKGRGGGGSGGGGSRPSGRKSSKMQAFRIWDYNQKTFYLRN
NQLVAGYLQGPNVNLEEKIDVVPIEPHALFLGIHGGKMCLSCVKSGDETRLQLEAVNITD
LSENRKQDKRFAFIRSDSGPTTSFESAASPGWFLCTAMEADQPVSLTNMPDEGVMVTKF
YFQEDE(S is the sulphur atom on the side chain of a cysteine residue);
G-46:
(SEQ ID NO: 46)
HAEGTFTSDC[S-CH₂-CONH-(CH₂CH₂O)₂-(CH₂)₂-NH-(N^{α}-(HOOC(CH₂)₁₄CO)-γ-Glu)]SSYL
EGQAAKEFIAWLYKGRGGGGSGGGGSRPSGRKSSKMQAFRIWDYNQKTFYLRNNQLVA
GYLQGPNVNLEEKIDVVPIEPHALFLGIHGGKMCLSCVKSGDETRLQLEAVNITDLSENR
KQDKRFAFIRSDSGPTTSFESAASPGWFLCTAMEADQPVSLTNMPDEGVMVTKFYFQED
E(S is the sulphur atom on the side chain of a cysteine residue);
G-47:
(SEQ ID NO: 47)
HGEGTFTSDVSSYLEEQAAKEFIAWLYC[S-CH₂-CONH-(CH₂CH₂O)₂-(CH₂)₂-NH-(N^{α}-(HOOC
(CH₂)₁₄CO)-γ-Glu)]GRGGGGSGGGGSRPSGRKSSKMQAFRIWDYNQKTFYLRNNQLY
AGYLQGPNVNLEEKIDVVPIEPHALFLGIHGGKMCLSCVKSGDETRLQLEAVNITDLSEN
RKQDKRFAFIRSDSGPTTSFESAASPGWFLCTAMEADQPVSLTNMPDEGVMVTKFYFQE
DE(S is the sulphur atom on the side chain of a cysteine residue);
G-48:
(SEQ ID NO: 48)
HGEGTFTSDVSSYLEEQAAKEFIAWLVKGRGGGGSGGGGSRPSGRKSSKMQAERIWDV
NQKTFYLRNNQLVAGYLQGPNVNLEEKIDVVPIEPHALFLGIHGGKMCLSCVKSGDETR
LQLEAVC[S-CH₂-CONH-(CH₂CH₂O)₄-(CH₂)₂-NH-(N^{α}-(HOOC(CH₂)₁₆CO)-γ-Glu)]ITDLSEN
RKQDKRFAFIRSDSGPTTSFESAASPGWFLCTAMEADQPVSLTNMPDEGVMVTKFEYFQE
DE(S is the sulphur atom on the side chain of a cysteine residue);
G-49:
(SEQ ID NO: 49)
HGEGTFTSDVSSYLEEQAAKEFIAWLVKGRGGGGSGGGGSRPSGRKSSKMQAPRIWDV
NQKTFYLRNNQLVAGYLQGPNVNLEEKIDVVPIEPHALFLGIHGGKMCLSCVKSGDETR
LQLEAVNITDLSENRKQDKRFAFIRSDSGPTTSFESAAC(S-maleimide-(CH₂)₁₅-COOH)PGW
FLCTAMEADQPVSLTNMPDEGVMVTKFYFQEDE(S is the sulphur atom on the side chain of
a cysteine residue);
G-50:
(SEQ ID NO: 50)
HGEGTFTSDVSSYLEEQAAKEFIAWLVKGRGGGGSGGGGSRPSGRKSSKMQAERIWDV
NQKTFYLRNNQLVAGYLQGPNVNLEEKIDVVPIEPHALFLGIHGGKMCLSCVKSGDETR
LQLEAVNITDLSENRKQDKRFAFIRSDSGPTTSFESAAC[S-CH₂-CONH-(CH₂CH₂O)₂-(CH₂)₂-
NH-(N^{α}-(HOOC(CH₂)₁₄CO)-γ-Glu)]PGWFLCTAMEADQPVSLTNMPDEGVMVTKFYFQE
DE(S is the sulphur atom on the side chain of a cysteine residue);
G-51:
(SEQ ID NO: 51)
RPSGRKSSKMQAFRIWDVNQKTFYLRNNQLVAGYLQGPNVNLEEKIDVVPIEPHALFLGI
HGGKMCLSCVKSGDETRLQLEAVC(S-maleimide-PEG11-maleimide-S-GLP-1 receptor
binding polypeptide)
ITDLSENRKQDKRFAFIRSDSGPTTSFESAASPGWFLCTAMEADQPVSLTNMPDE
GVMVTKFYFQEDE(S is the sulphur atom on the side chain of a cysteine residue),

wherein the GLP-1 receptor binding polypeptide has the following sequence: HGEGTFTSDLSKQMEEEAVRLFIEWLKNGGPSSGAPPPC (SEQ ID NO:185) and is linked to the interleukin-1 receptor antagonistic protein by reacting the mercapto group on the side chain of a terminal cysteine residue with the maleimide;

G-52:
(SEQ ID NO: 52)
RPSGRKSSKMQAFRIWDVNQKTFYLRNNQLVAGYLQGPNVNLEEKIDVVP
IEPHALFLGIHGGKMCLSCVKSGDETRLQLEAVNITDLSENRKQDKRFAF
IRSDSGPTTSFESAAC
(S-maleimide-PEG11-maleimide-S-GLP-1 receptor
binding polypeptide)
PGWFLCTAMEADQPVSLT NMPDEGVMVTKFYFQEDE(S is the
sulphur atom on the side chain of a cysteine
residue),

wherein the GLP-1 receptor binding polypeptide has the sequence of SEQ ID NO: 185 and is linked to the interleukin-1 receptor antagonistic protein by reacting the mercapto group on the side chain of a terminal cysteine residue with the maleimide;

G-53:
(SEQ ID NO: 53)
RPSGRKSSKMQAFRIWDVNQKTFYLRNNQLVAGYLQGPNVNLEEKIDVVP
IEPHALFLGIHGGKMCLSCVKSGDETRLQLEAVC(S-maleimide-
PEG11-maleimide-S-GLP-1 receptor binding
polypeptide)ITDLSENRKQDKRFAFIRSDSGPTTSFESAASPGWFLC
TAMEADQPVSLTNMPDEGVMVTKFYFQEDE(S is the sulphur
atom on the side chain of a cysteine residue),

wherein the GLP-1 receptor binding polypeptide has the following sequence: HGEGTFTSDVSSYLEEQAAKEFIAWLVKGRC(SEQ ID NO: 186) and is linked to the interleukin-1 receptor antagonistic protein by reacting the mercapto group on the side chain of a terminal cysteine residue with the maleimide;

G-54:
(SEQ ID NO: 54)
RPSGRKSSKMQAFRIWDVNQKTFYLRNNQLVAGYLQGPNVNLEEKIDVVP
IEPHALFLGIHGGKMCLSCVKSGDETRLQLEAVNITDLSENRKQDKRFAF
IRSDSGPTTSFESAAC (S-maleimide-PEG11-maleimide-S-
GLP-1 receptor binding polypeptide)PGWFLCTAMEADQPV
SLT NMPDEGVMVTKFYFQEDE(S is the sulphur atom on
the side chain of a cysteine residue),

wherein the GLP-1 receptor binding polypeptide has the sequence of SEQ ID NO: 186 and is linked to the interleukin-1 receptor antagonistic protein by reacting the mercapto group on the side chain of a terminal cysteine residue with the maleimide;

G-55:
(SEQ ID NO: 55)
RPSGRKSSKMQAFRIWDVNQKTFYLRNNQLVAGYLQGPNVNLEEKIDVVP
IEPHALFLGIHGGKMCLSCVKSGDETRLQLEAVC(S-maleimide-
PEG11-maleimide-S-GLP-1 receptor binding
polypeptide)ITDLSENRKQDKRFAFIRSDSGPTTSFESAASPGWFLC
TAMEADQPVSLTNMPDEGVMVTKFYFQEDE(S is the sulphur
atom on the side chain of a cysteine residue),

wherein the GLP-1 receptor binding polypeptide has the following sequence:

(SEQ ID NO: 187)
HGEGTFTSDVSSYLEEQAAKEFIAWLVCGRG

and is linked to the interleukin-1 receptor antagonistic protein by reacting the mercapto group on the side chain of a cysteine residue with the maleimide;

G-56:
(SEQ ID NO: 56)
RPSGRKSSKMQAFRIWDVNQKTFYLRNNQLVAGYLQGPNVNLEEKIDVVP
IEPHALFLGIHGGKMCLSCVKSGDETRLQLEAVNITDLSENRKQDKRFAF
IRSDSGPTTSFESAAC
(S-maleimide-PEG11-maleimide-S-GLP-1
receptor binding polypeptide)
PGWFLCTAMEADQPVSLTNM PDEGVMVTKFYFQEDE
(S is the sulphur atom on the side chain
of a cysteine residue),

wherein the GLP-1 receptor binding polypeptide has the sequence of SEQ ID NO:187 and is linked to the interleukin-1 receptor antagonistic protein by reacting the mercapto group on the side chain of a cysteine residue with the maleimide;

G-57:
(SEQ ID NO: 57)
RPSGRKSSKMQAFRIWDVNQKTFYLRNNQLVAGYLQGPNVNLEEKIDVVP
IEPHALFLGIHGGKMCLSCVKSGDETRLQLEAVC
(S-maleimide-PEG11-maleimide-S-GLP-1 receptor
binding polypeptide)
ITDLSENRKQDKRFAFIRSDSGPTTSFESAASPGWFLCTAMEADQPVSLT
NMPDE GVMVTKFYFQEDE
(S is the sulphur atom on the side chain
of a cysteine residue),

wherein the GLP-1 receptor binding polypeptide has the following sequence: HGEGTFTSDLSKQMEEEAVRLFIEWLCNGGPSSGAPPPS (SEQ ID NO:188) and is linked to the interleukin-1 receptor antagonistic protein by reacting the mercapto group on the side chain of a cysteine residue with the maleimide;

G-58:
(SEQ ID NO: 58)
RPSGRKSSKMQAFRIWDVNQKTFYLRNNQLVAGYLQGPNVNLEEKIDVVP
IEPHALFLGIHGGKMCLSCVKSGDETRLQLEAVNITDLSENRKQDKRFAF
IRSDSGPTTSFESAAC
(S-maleimide-PEG11-maleimide-S-GLP-1 receptor
binding polypeptide)
PGWFLCTAMEADQPVSLTN-MPDEGVMVTKFYFQEDE
(S is the sulphur atom on the side chain
of a cysteine residue),

wherein the the GLP-1 receptor binding polypeptide has the sequence of SEQ ID NO: 188 and is linked to the interleukin-1 receptor antagonistic protein by reacting the mercapto group on the side chain of a cysteine residue with the maleimide;

G-59:
(SEQ ID NO: 59)
RPSGRKSSKMQAFRIWDVNQKTFYLRNNQLVAGYLQGPNVNLEEKIDVVP
IEPHALFLGIHGGKMCLSCVKSGDETRLQLEAVC
(S-maleimide-PEG20K-maleimide-S-GLP-1 receptor
binding polypeptide)
ITDLSENRKQDKRFAFIRSDSGPTTSFESAASPGWFLCTAMEADQPVSLT
NMPDE GVMVTKFYFQEDE
(S is the sulphur atom on the side chain
of a cysteine residue),

wherein the GLP-1 receptor binding polypeptide has the sequence of SEQ ID NO: 185 and is linked to the interleukin-1 receptor antagonistic protein by reacting the mercapto group on the side chain of a terminal cysteine residue with the maleimide;

G-60:
(SEQ ID NO: 60)
RPSGRKSSKMQAFRIWDVNQKTFYLRNNQLVAGYLQGPNVNLEEKIDVVP
IEPHALFLGIHGGKMCLSCVKSGDETRLQLEAVNITDLSENRKQDKRFAF
IRSDSGPTTSFESAAC
(S-maleimide-PEG20K-maleimide-S-GLP-1 receptor
binding polypeptide)
PGWFLCTAMEADQPVSLT NMPDEGVMVTKFYFQEDE
(S is the sulphur atom on the side chain
of a cysteine residue),

wherein the GLP-1 receptor binding polypeptide has the sequence of SEQ ID NO: 185 and is linked to the interleukin-1 receptor antagonistic protein by reacting the mercapto group on the side chain of a terminal cysteine residue with the maleimide;

G-61:
(SEQ ID NO: 61)
RPSGRKSSKMQAFRIWDVNQKTFYLRNNQLVAGYLQGPNVNLEEKIDVVP
IEPHALFLGIHGGKMCLSCVKSGDETRLQLEAVC
(S-maleimide-PEG20K-maleimide-S-GLP-1 receptor
binding polypeptide)
ITDLSENRKQDKRFAFIRSDSGPTTSFESAASPGWFLCTAMEADQPVSLT
NMPD EGVMVTKFYFQEDE
(S is the sulphur atom on the side chain
of a cysteine residue),

wherein the GLP-1 receptor binding polypeptide has the following sequence:

(SEQ ID NO: 189)
HAibEGTFTSDVSSYLEGQAAKEFIAWLVKGRC

and is linked to the interleukin-1 receptor antagonistic protein by reacting the mercapto group on the side chain of a terminal cysteine residue with the maleimide;

G-62:
(SEQ ID NO: 62)
RPSGRKSSKMQAFRIWDVNQKTFYLRNNQLVAGYLQGPNVNLEEKIDVVP
IEPHALFLGIHGGKMCLSCVKSGDETRLQLEAVNITDLSENRKQDKRFAF
IRSDSGPTTSFESAAC
(S-maleimide-PEG20K-maleimide-S-GLP-1 receptor
binding polypeptide)
PGWFLCTAMEADQPVSLT NMPDEGVMVTKFYFQEDE
(S is the sulphur atom on the side chain
of a cysteine residue),

wherein the GLP-1 receptor binding polypeptide has the sequence of SEQ ID NO: 186 and is linked to the interleukin-1 receptor antagonistic protein by reacting the mercapto group on the side chain of a terminal cysteine residue with the maleimide;

G-63:
(SEQ ID NO: 63)
RPSGRKSSKMQAFRIWDVNQKTFYLRNNQLVAGYLQGPNVNLEEKIDVVP
IEPHALFLGIHGGKMCLSCVKSGDETRLQLEAVC
(S-maleimide-PEG20K-maleimide-S-GLP-1 receptor
binding polypeptide)
ITDLSENRKQDKRFAFIRSDSGPTTSFESAASPGWFLCTAMEADQPVSLT
NMPDEGVMVTKFYFQEDE
(S is the sulphur atom on the side chain
of a cysteine residue),

wherein the GLP-1 receptor binding polypeptide has the sequence of SEQ ID NO: 187 and is linked to the interleukin-1 receptor antagonistic protein by reacting the mercapto group on the side chain of a cysteine residue with the maleimide;

G-64:
(SEQ ID NO: 64)
RPSGRKSSKMQAFRIWDVNQKTFYLRNNQLVAGYLQGPNVNLEEKIDVVP
IEPHALFLGIHGGKMCLSCVKSGDETRLQLEAVNITDLSENRKQDKRFAF
IRSDSGPTTSFESAAC
(S-maleimide-PEG20K-maleimide-S-GLP-1 receptor
binding polypeptide)
PGWFLCTAMEADQPVSLTNMPD EGVMVTKFYFQEDE
(S is the sulphur atom on the side chain
of a cysteine residue),

wherein the GLP-1 receptor binding polypeptide has the following sequence:

(SEQ ID NO: 190)
HAibEGTFTSDVSSYLEGQAAKEFIAWLVCGRG

and is linked to the interleukin-1 receptor antagonistic protein by reacting the mercapto group on the side chain of a cysteine residue with the maleimide;

G-65:
(SEQ ID NO: 65)
RPSGRKSSKMQAFRIWDVNQKTFYLRNNQLVAGYLQGPNVNLEEKIDVVP
IEPHALFLGIHGGKMCLSCVKSGDETRLQLEAVC
(S-maleimide-PEG20K-maleimide-S-GLP-1 receptor
binding polypeptide)
ITDLSENRKQDKRFAFIRSDSGPTTSFESAASPGWFLCTAMEADQPVSLT
NMPD EGVMVTKFYFQEDE
(S is the sulphur atom on the side chain
of a cysteine residue),

wherein the GLP-1 receptor binding polypeptide has the sequence of SEQ ID NO: 188 and is linked to the interleukin-1 receptor antagonistic protein by reacting the mercapto group on the side chain of a cysteine residue with the maleimide;

G-66:
(SEQ ID NO: 66)
RPSGRKSSKMQAFRIWDVNQKTFYLRNNQLVAGYLQGPNVNLEEKIDVVP
IEPHALFLGIHGGKMCLSCVKSGDETRLQLEAVNITDLSENRKQDKRFAF
IRSDSGPTTSFESAAC
(S-maleimide-PEG20K-maleimide-S-GLP-1 receptor
binding polypeptide)
PGWFLCTAMEADQPVSLTN-MPDEGVMVTKFYFQEDE
(S is the sulphur atom on the side chain
of a cysteine residue),

wherein the GLP-1 receptor binding polypeptide has the sequence of SEQ ID NO: 188 and is linked to the interleukin-1 receptor antagonistic protein by reacting the mercapto group on the side chain of a cysteine residue with the maleimide;

G-67:
(SEQ ID NO: 67)
(GLP-1 receptor binding polypeptide-S-
maleimide-PEG20K-maleimide-S)
CRPSGRKSSKMQAPRIWDVNQKTFYLRNNQLVAGYLQGPNVNLEEKIDVV
PIEPHALFLGIHGGKMCLSCVKSGDETRLQLEAVNITDLSENRKQDKRFA
FIRSDSGPTTSFESAASPGWELCTAMEADQPVSLTNMPDEGVMVTKFYFQ
EDE
(S is the sulphur atom on the side chain
of a cysteine residue),

wherein the GLP-1 receptor binding polypeptide has the sequence of SEQ ID NO: 185 and is linked to the interleukin-1 receptor antagonistic protein by reacting the mercapto group on the side chain of a terminal cysteine residue with the maleimide;

G-68:
(SEQ ID NO: 68)
(PEG20K)RPSGRKSSKMQAFRIWDVNQKTFYLRNNQLVAGYLQGPNVNL
EEKIDVVPIEPHALFLGIHGGKMCLSCVKSGDETRLQLEAVNITDLSENR
KQDKRFAFIRSDSGPTTSFESAAC
(S-maleimide-PEG11-maleimide-S-GLP-1 receptor
binding polypeptide)
PGWFLCTAMEADQPVSLTNMPDEGVMVTKFYFQEDE
(S is the sulphur atom on the side chain
of a cysteine residue),

wherein the GLP-1 receptor binding polypeptide has the sequence of SEQ ID NO: 185 and is linked to the interleukin-1 receptor antagonistic protein by reacting the mercapto group on the side chain of a terminal cysteine residue with the maleimide;

G-69:
(SEQ ID NO: 69)
(PEG20K)RPSGRKSSKMQAFRIWDVNQKTFYLRNNQLVAGYLQGPN
VNLEEKIDVVPIEPHALFLGIHGGKMCLSCVKSGDETRLQLEAVC
(S-maleimide-PEG11-maleimide-S-GLP-1 receptor
binding polypeptide)
ITDLSENRKQDKRFAFIRSDSGPTTSFESAASPGWFLCTAMEADQPV
SLTNMPDEGVMVTKFYFQEDE,
(S is the sulphur atom on the side chain of a
cysteine residue)

[0298] G-69:

wherein the GLP-1 receptor binding polypeptide has the sequence of SEQ ID NO: 186 and is linked to the interleukin-1 receptor antagonistic protein by reacting the mercapto group on the side chain of a terminal cysteine residue with the maleimide;

G-70:
(SEQ ID NO: 70)
(GLP-1 receptor binding polypeptide-S-maleimide-
PEG20K-maleimide-S)
CRPSGRKSSKMQAPRIWDVNQKTFYLRNNQLVAGYLQGPNVNLEEKI
DVVPIEPHALFLGIHGGKMCLSCVKSGDETRLQLEAVNITDLSENRK
QDKRFAFIRSDSGPTTSFESAASPGWFLCTAMEADQPVSLTNMPDEG
VMVTKFYFQEDE,
(S is the sulphur atom on the side chain of a
cysteine residue)

wherein the GLP-1 receptor binding polypeptide has the sequence of SEQ ID NO: 189 and is linked to the interleukin-1 receptor antagonistic protein by reacting the mercapto group on the side chain of a terminal cysteine residue with the maleimide;

G-71:
(SEQ ID NO: 71)
RPSGRKSSKMQAFRIWDVNQKTFYLRNNQLVAGYLQGPNVNLEEKID
VVPIEPHALFLGIHGGKMCLSCVKSGDETRLQLEAVC
(S-maleimide-PEG11-maleimide-S-GLP-1 receptor
binding polypeptide)
ITDLSENRKQDKRFAFIRSDSGPTTSFESAASPGWFLCTAMEADQPV
SLTNMPDEGVMVTKFYFQEDE,
(S is the sulphur atom on the side chain of a
cysteine residue)

wherein the GLP-1 receptor binding polypeptide has the following sequence:

(SEQ ID NO: 191)
HAibEGTFTSDVSSYLEEQAAKEFIAWLVKGRC

and is linked to the interleukin-1 receptor antagonistic protein by reacting the mercapto group on the side chain of a terminal cysteine residue with the maleimide;

G-72:
(SEQ ID NO: 72)
RPSGRKSSKMQAFRIWDVNQKTFYLRNNQLVAGYLQGPNVNLEEKQI
DVVPIEPHALFLGIHGGKMCLSCVKSGDETRLLEAVNITDLSENRKQ
DKRFAFIRSDSGPTTSFESAAC
(S-maleimide-PEG11-maleimide-S-GLP-1 receptor
binding polypeptide)
PGWFLCTAMEADQPVSLTNMPDEGVMVTKFYFQEDE,
(S is the sulphur atom on the side chain of a
cysteine residue)

wherein the GLP-1 receptor binding polypeptide has the sequence of SEQ ID NO: 191 and is linked to the interleukin-1 receptor antagonistic protein by reacting the mercapto group on the side chain of a terminal cysteine residue with the maleimide;

G-73:
(SEQ ID NO: 73)
RPSGRKSSKMQAFRIWDVNQKTFYLRNNQLVAGYLQGPNVNLEEKID
VVPIEPHALFLGIHGGKMCLSCVKSGDETRLQLEAVC
(S-maleimide-PEG11-maleimide-S-GLP-1 receptor
binding polypeptide)
ITDLSENRKQDKRFAFIRSDSGPTTSFESAASPGWFLCTAMEADQPV
SLTNMPDEGVMVTKFYFQEDE,
(S is the sulphur atom on the side chain of a
cysteine residue)

wherein the GLP-1 receptor binding polypeptide has the sequence of SEQ ID NO:189 and is linked to the interleukin-1 receptor antagonistic protein by reacting the mercapto group on the side chain of a terminal cysteine residue with the maleimide;

G-74:
(SEQ ID NO: 74)
RPSGRKSSKMQAFRIWDVNQKTFYLRNNQLVAGYLQGPNVNLEEKID
VVPIEPHALFLGIHGGKMCLSCVKSGDETRLQLEAVNITDLSENRKQ
DKRFAFIRSDSGPTTSFESAAC
(S-maleimide-PEG11-maleimide-S-GLP-1 receptor
binding polypeptide)
PGWFLCTAMEADQPVSLTNMPDEGVMVTKFYFQEDE,
(S is the sulphur atom on the side chain of a
cysteine residue)

wherein the GLP-1 receptor binding polypeptide has the sequence of SEQ ID NO:189 and is linked to the interleukin-1 receptor antagonistic protein by reacting the mercapto group on the side chain of a terminal cysteine residue with the maleimide;

G-75:
(SEQ ID NO: 75)
RPSGRKSSKMQAFRIWDVNQKTFYLRNNQLVAGYLQGPNVNLEEKID
VVPIEPHALFLGIHGGKMCLSCVKSGDETRLQLEAVC
(S-maleimide-PEG11-maleimide-S-GLP-1 receptor
binding polypeptide)
ITDLSENRKQDKRFAFIRSDSGPTTSFESAASPGWFLCTAMEADQPV
SLTNMPDEGVMVTKFYFQEDE,
(S is the sulphur atom on the side chain of a
cysteine residue)

wherein the GLP-1 receptor binding polypeptide has the sequence of SEQ ID NO: 190 and is linked to the interleukin-1 receptor antagonistic protein by reacting the mercapto group on the side chain of a cysteine residue with the maleimide;

G-76:
(SEQ ID NO: 76)
RPSGRKSSKMQAFRIWDVNQKTFYLRNNQLVAGYLQGPNVNLEEKID
VVPIEPHALFLGIHGGKMCLSCVKSGDETRLQLEAVNITDLSENRKQ
DKRFAFIRSDSGPTTSFESAAC
(S-maleimide-PEG11-maleimide-S-GLP-1 receptor
binding polypeptide)
PGWFLCTAMEADQPVSLTNMPDEGVMVTKFYFQEDE,
(S is the sulphur atom on the side chain of a
cysteine residue)

wherein the GLP-1 receptor binding polypeptide has the sequence of SEQ ID NO: 190 and is linked to the interleukin-1 receptor antagonistic protein by reacting the mercapto group on the side chain of a cysteine residue with the maleimide;

G-77:
(SEQ ID NO: 77)
RPSGRKSSKMQAFRIWDVNQKTFYLRNNQLVAGYLQGPNVNLEEKID
VVPIEPHALFLGIHGGKMCLSCVKSGDETRLQLEAVC
(S-maleimide-PEG11-maleimide-S-GLP-1 receptor
binding polypeptide)
ITDLSENRKQDKRFAFIRSDSGPTTSFESAASPGWFLCTAMEADQPV
SLTNMPDEGVMVTKFYFQEDE,
(S is the sulphur atom on the side chain of a
cysteine residue)

wherein the GLP-1 receptor binding polypeptide has the following sequence:

(SEQ ID NO: 192)
HAibEGTFTSDVSSYLEGQAACEFIAWLVKGRG

and is linked to the interleukin-1 receptor antagonistic protein by reacting the mercapto group on the side chain of a cysteine residue with the maleimide;

G-78:
(SEQ ID NO: 78)
RPSGRKSSKMQAFRIWDVNQKTFYLRNNQLVAGYLQGPNVNLEEKID
VVPIEPHALFLGIHGGKMCLSCVKSGDETRLQLEAVNITDLSENRKQ
DKRFAFIRSDSGPTTSFESAAC
(S-maleimide-PEG11-maleimide-S-GLP-1 receptor
binding polypeptide)
PGWFLCTAMEADQPVSLTN-MPDEGVMVTKFYFQEDE,
(S is the sulphur atom on the side chain of a
cysteine residue)

wherein the GLP-1 receptor binding polypeptide has the sequence of SEQ ID NO: 192 and is linked to the interleukin-1 receptor antagonistic protein by reacting the mercapto group on the side chain of a cysteine residue with the maleimide;

G-79:
(SEQ ID NO: 79)
RPSGRKSSKMQAFRIWDVNQKTFYLRNNQLVAGYLQGPNVNLEEKID
VVPIEPHALFLGIHGGKMCLSCVKSGDETRLQLEAVC
(S-maleimide-PEG11-maleimide-S-GLP-1 receptor
binding polypeptide)
ITDLSENRKQDKRFAFIRSDSGPTTSFESAASPGWFLCTAMEADQPV
SLTNMPDEGVMVTKFYFQEDE,
(S is the sulphur atom on the side chain of a
cysteine residue)

wherein the GLP-1 receptor binding polypeptide has the following sequence:

(SEQ ID NO: 193)
HAEGTFTSDVSSYLEGQAAK[N^{ε}-(N^{α}-(HOOC(CH₂)₁₄CO)-
γ-L-Glu)]EFIAWLVRGRC

and is linked to the interleukin-1 receptor antagonistic protein by reacting the mercapto group on the side chain of a terminal cysteine residue with the maleimide;

G-80:
(SEQ ID NO: 80)
RPSGRKSSKMQAFRIWDVNQKTFYLRNNQLVAGYLQGPNVNLEEKID
VVPIEPHALFLGIHGGKMCLSCVKSGDETRLQLEAVNITDLSENRKQ
DKRFAFIRSDSGPTTSFESAAC
(S-maleimide-PEG11-maleimide-S-GLP-1 receptor
binding polypeptide)
PGWFLCTAMEADQPVSLTN-MPDEGVMVTKFYFQEDE,
(S is the sulphur atom on the side chain of a
cysteine residue)

wherein the GLP-1 receptor binding polypeptide has the sequence of SEQ ID NO: 193 and is linked to the interleukin-1 receptor antagonistic protein by reacting the mercapto group on the side chain of a terminal cysteine residue with the maleimide;

G-81:
(SEQ ID NO: 81)
HGEGTFTSDLSKQMEEEAVRLFIEWLKNGGPSSGAPPPSGGGGSGGG
GSDAHKSEVAHRFKDLGEENFKALVLIAFAQYLQQCPFEDHVKLVNE
VTEFAKTCVADESAENCDKSLHTLFGDKLCTVATLRETYGEMADCCA
KQEPERNECFLQHKDDNPNLPRLVRPEVDVMCTAFHDNEETFLKKYL
YEIARRHPYFYAPELLFFAKRYKAAFTECCQAADKAACLLPKLDELR
DEGKASSAKQRLKCASLQKFGERAFKAWAVARLSQRFPKAEFAEVSK
LVTDLTKVHTECCHGDLLECADDRADLAKYICENQDSISSKLKECCE
KPLLEKSHCIAEVENDEMPADLPSLAADFVESKDVCKNYAEAKDVFL
GMFLYEYARRHPDYSVVLLLRLAKTYETTLEKCCAAADPHECYAKVF
DEFKPLVEEPQNLIKQNCELFEQLGEYKFQNALLVRYTKKVPQVSTP
TLVEVSRNLGKVGSKCCKHPEAKRMPCAEDYLSVVLNQLCVLHEKTP
VSDRVTKCCTESLVNRRPCFSALEVDETYVPKEFNAETFTFHADICT
LSEKERQIKKQTALVELVKHKPKATKEQLKAVMDDFAAFVEKCCKAD
DKETCFAEEGKKLVAASQAALGLGGGGSGGGGSRPSGRKSSKMQAFR
IWDVNQKTFYLRNNQLVAGYLQGPNVNLEEKIDVVPIEPHALFLGIH
GGKMCLSCVKSGDETRLQLEAVNITDLSENRKQDKRFAFIRSDSGPT
TSFESAACPGWFLCTAMEADQPVSLTNMPDEGVMVTKFYFQEDE;
G-82:
(SEQ ID NO: 82)
HGEGTFTSDVSSYLEEQAAKEFIAWLVKGRPSSGAPPPSGGGGSGGG
GSDAHKSEVAHRFKDLGEENFKALVLIAFAQYLQQCPFEDHVKLVNE
VTEFAKTCVADESAENCDKSLHTLFGDKLCTVATLRETYGEMADCCA
KQEPERNECFLQHKDDNPNLPRLVRPEVDVMCTAFHDNEETFLKKYL
YEIARRHPYFYAPELLFFAKRYKAAFTECCQAADKAACLLPKLDELR
DEGKASSAKQRLKCASLQKFGERAFKAWAVARLSQRFPKAEFAEVSK
LVTDLTKVHTECCHGDLLECADDRADLAKYICENQDSISSKLKECCE
KPLLEKSHCIAEVENDEMPADLPSLAADFVESKDVCKNYAEAKDVFL
GMFLYEYARRHPDYSVVLLLRLAKTYETTLEKCCAAADPHECYAKVE
DEFKPLVEEPQNLIKQNCELFEQLGEYKFQNALLVRYTKKVPQVSTP
TLVEVSRNLGKVGSKCCKHPEAKRMPCAEDYLSVVLNQLCVLHEKTP
VSDRVTKCCTESLVNRRPCFSALEVDETYVPKEFNAETFTFHADICT
LSEKERQIKKQTALVELVKHKPKATKEQLKAVMDDFAAFVEKCCKAD
DKETCFAEEGKKLVAASQAALGLGGGGSGGGGSRPSGRKSSKMQAFR
IWDVNQKTFYLRNNQLVAGYLQGPNVNLEEKIDVVPIEPHALFLGIH
GGKMCLSCVKSGDETRLQLEAVNITDLSENRKQDKRFAFIRSDSGPT
TSFESAACPGWFLCTAMEADQPVSLTNMPDEGVMVTKFYFQEDE;
G-83:
(SEQ ID NO: 83)
HGEGTFTSDLSKQMEEEAVRLFIEWLKNGGPSSGAPPPSGGGGSGGG
GSRPSGRKSSKMQAFRIWDVNQKTFYLRNNQLVAGYLQGPNVNLEEK
IDVVPIEPHALFLGIHGGKMCLSCVKSGDETRLQLEAVNITDLSENR
KQDKRFAFIRSDSGPTTSFESAACPGWFLCTAMEADQPVSLTNMPDE
GVMVTKEYFQEDEGGGGSGGGGSDAHKSEVAHREKDLGEENFKALVL
IAFAQYLQQCPFEDHVKLVNEVTEFAKTCVADESAENCDKSLHTLFG
DKLCTVATLRETYGEMADCCAKQEPERNECFLQHKDDNPNLPRLVRP
EVDVMCTAFHDNEETFLKKYLYEIARRHPYFYAPELLFFAKRYKAAF
TECCQAADKAACLLPKLDELRDEGKASSAKQRLKCASLQKFGERAFK
AWAVARLSQRFPKAEFAEVSKLVTDLTKVHTECCHGDLLECADDRAD
LAKYICENQDSISSKLKECCEKPLLEKSHCIAEVENDEMPADLPSLA
ADEVESKDVCKNYAEAKDVFLGMFLYEYARRHPDYSVVLLLRLAKTY
ETTLEKCCAAADPHECYAKVFDEFKPLVEEPQNLIKQNCELFEQLGE
YKFQNALLVRYTKKVPQVSTPTLVEVSRNLGKVGSKCCKHPEAKRMP
CAEDYLSVVLNQLCVLHEKTPVSDRVTKCCTESLVNRRPCFSALEVD
ETYVPKEFNAETFTFHADICTLSEKERQIKKQTALVELVKHKPKATK
EQLKAVMDDFAAFVEKCCKADDKETCFAEEGKKLVAASQAALGL;
G-84:
(SEQ ID NO: 84)
HGEGTFTSDVSSYLEEQAAKEFIAWLVKGRPSSGAPPPSGGGGSGGG
GSRPSGRKSSKMQAFRIWDVNQKTFYLRNNQLVAGYLQGPNVNLEEK
IDVVPIEPHALFLGIHGGKMCLSCVKSGDETRLQLEAVNITDLSENR
KQDKRFAFIRSDSGPTTSFESAACPGWELCTAMEADQPVSLTNMPDE
GVMVTKFYFQEDEGGGGSGGGGSDAHKSEVAHRFKDLGEENFKALVL
IAFAQYLQQCPFEDHVKLVNEVTEFAKTCVADESAENCDKSLHTLFG
DKLCTVATLRETYGEMADCCAKQEPERNECFLQHKDDNPNLPRLVRP
EVDVMCTAFHDNEETFLKKYLYEIARRHPYFYAPELLFFAKRYKAAF
TECCQAADKAACLLPKLDELRDEGKASSAKQRLKCASLQKFGERAFK
AWAVARLSQRFPKAEFAEVSKLVTDLTKVHTECCHGDLLECADDRAD
LAKYICENQDSISSKLKECCEKPLLEKSHCIAEVENDEMPADLPSLA
ADFVESKDVCKNYAEAKDVFLGMFLYEYARRHPDYSVVLLLRLAKTY
ETTLEKCCAAADPHECYAKVFDEFKPLVEEPQNLIKQNCELFEQLGE
YKFQNALLVRYTKKVPQVSTPTLVEVSRNLGKVGSKCCKHPEAKRMP
CAEDYLSVVLNQLCVLHEKTPVSDRVTKCCTESLVNRRPCFSALEVD
ETYVPKEFNAETFTFHADICTLSEKERQIKKQTALVELVKHKPKATK
EQLKAVMDDFAAFVEKCCKADDKETCFAEEGKKLVAASQAALGL;

[0299] In the sequences in the section, the structure of C (S-maleimide-(CH₂)ₙ—COOH) is shown as follows:

[chemical structure]

wherein n is an integer from 1 to 25.
[0300] In the sequences in the section, the structure of C[S—CH₂—CONH—(CH₂CH₂O)₂—(CH₂)₂—NH—(N^{α}—(HOOC (CH₂)₁₄CO)-γ-Glu)] is shown as follows:

[chemical structure]

[0301] In the sequences in the section, the structure of C-[S—CH₂—CONH—(CH₂CH₂O)₂—(CH₂)₂—NH—(N^{α}—(HOOC(CH₂)₄CO)-γ-Glu-N-γ-Glu)] is shown as follows:

[chemical structure]

[0302] In the sequences in the section, the structure of C[S-maleimide-(CH₂)₄—NH—(N^{α}—(HOOC(CH₂)₁₄CO)-γ-Glu)] is shown as follows:

[chemical structure]

[0303] In the sequences in the section, the structure of maleimide-PEG 1-maleimide is shown as follows:

[chemical structure]

[0304] In the sequences in the section, the structure of maleimide-PEG20K-maleimide is shown as follows:

[chemical structure]

[0305] wherein n is an integer from 0 to 2000.

[0306] 2. The fusion protein consisting of the insulin receptor binding polypeptide and the interleukin-1 receptor antagonistic protein

[0307] The insulin receptor binding polypeptide comprises an A chain and a B chain, in which

[0308] the amino acid sequence of the A chain is:

(SEQ ID NO: 380)
GIVEQC_{[3]}C_{[4]}X_{IN8}SIC_{[5]}SLYQLENYC_{[6]}X_{IN21}X_{IN22}
or
(SEQ ID NO: 381)
GIVEQC_{[3]}C_{[4]}TSIC_{[5]}SLYQLENYC_{[6]}N;

[0309] The amino acid sequence of the B chain is:

(SEQ ID NO: 382)
X_{IN23-26}HLC_{[1]}GSHLVEALYLVC_{[2]}GERGFX_{IN47}X_{IN48}X_{IN49}
X_{IN50}X_{IN51}X_{IN52},

wherein

[0310] X_{IN8} is a threonine, histidine, or arginine; X_{I21} is an alanine, glycine, or asparagine; X_{IN22} is a lysine, a dipeptide of arginine-lysine, or absent; X_{IN23-26} is a tetrapeptide of phenylalanine-valine-asparagine-glutamine, a tripeptide of valine-asparagine-glutamine, a dipeptide of asparagine-glutamine, glutamine, or absent; X_{IN47} is a tyrosine, or phenylalanine; X_{IN48} is a —NH₂, dA-NH₂, tyrosine, or phenylalanine; X_{IN49} is a threonine, asparagine, or absent; X_{IN50} is a lysine, proline, glutamic acid, aspartic acid, or absent; X_{IN51} is a proline, arginine, lysine, glutamic acid, aspartic acid, or absent; X_{IN52} is a threonine, threonine-arginine-arginine, or absent;

[0311] [1] to [6] in the compound indicate the Nos. of the cysteines; 3 pairs of disulfide bonds are formed with six cysteines in the compound, in which the A chain and the B chain are connected by two pairs of interchain disulfide bonds, a pair of intrachain disulfide bond is present in the A chain, and the specific positions for the three pairs of the disulfide bonds are: C_{[1]} and C_{[4]} forming a disulfide bond, C_{[2]} and C_{[6]} forming a disulfide bond, and C_{[3]} and C_{[5]} forming a disulfide bond.

[0312] In another embodiment, the structure of the amino acid sequence of the single chaininsulin receptor binding polypeptide is:

(SEQ ID NO: 383)
X_{IN107}HLC_{[1]}GSX_{IN108}LVEALYLVC_{[2]}GEX_{IN109}GFX_{IN110}
X_{IN111}X_{IN112}X_{IN113}X_{IN114}X_{IN115}-C_{L}-GIVEQC_{[3]}C_{[4]}X_{IN127}
SIC_{[5]}SLYQLENYC_{[6]}X_{IN128}X_{IN129},

[0313] X_{IN107} is a tetrapeptide of phenylalanine-valine-asparagine-glutamine, a tripeptide of valine-asparagine-glutamine, a dipeptide of asparagine-glutamine, glutamine, a sequence wherein any one of the amino acid residues in the sequence of the tetrapeptide, tripeptide, and dipeptide is substituted with a lysine or arginine, or absent; X_{IN108} is a histidine, phenylalanine, arginine, or glutamine; X_{IN109} is an arginine, alanine, glutamic acid, or aspartic acid; X_{IN110} is a phenylalanine, tyrosine, or histidine; X_{IN111} is a tyrosine, phenylalanine, or absent; X_{IN112} is a threonine, asparagine, or absent; X_{IN113} is a proline, lysine, glutamic acid, aspartic acid, or absent; X_{IN114} is a lysine, proline, arginine, glutamic acid, aspartic acid or absent; X_{IN115} is a threonine, or absent; X_{IN127} is a threonine, histidine, or arginine; X_{IN128} is an alanine, glycine, or asparagine; X_{IN129} is a lysine, a dipeptide of arginine-lysine, or absent; C_{L} is a peptide sequence of 6-60 amino acids, wherein the amino acids are primarily selected from the group consisting of glycine, alanine, serine, threonine and proline.

[0314] A suitable linking fragment C_{L} has three characteristics. The first characteristic is that linking fragment is required to have an appropriate length. When the B chain has the full length of thirty amino acids, the linking fragment is better to have no less than six amino acids in length. When the B chain has twenty-five amino acids, the linking fragment is better to have no less than ten amino acids in length. If the length of the linking fragment is too long or too short (shorter than above-mentioned number of the amino acids, or longer than sixty amino acids), the binding capability of the single chain analogue of the insulin receptor tends to decrease. The second is that the linking fragment is preferred to have no secondary structure, so that its spatial conformation can be changed flexibly. The third is that the linking fragment itself has no biological activity and can provide the sites for polypeptide modification, such as, sites for acylation, glycosylation, etc.

[0315] The linking fragment C_{L} may include one or more of aspartic acid, glutamic acid, arginine, lysine, cysteine or asparagine residues. C_{L} may comprise 1, 2, 3, 4 of aspartic acid, glutamic acid, arginine, or lysine residues to regulate the charge equilibrium in the sequence of the polypeptide and improve solubility thereof. The sequence can comprise 1, 2, 3, 4, 5 of asparagine and the same amount of serine or threonine, thus constituting a consensus sequence N-X-S/T required for the N-glycosylation (X is an encodable natural amino acid). Furthermore, the peptide can further comprise 1, 2, 3 or 4 of lysine or cysteine residues, of which the amino or mercapto group on the side chain can be linked to a natural or synthetic modifying group such as a fatty acid, polyethylene glycol, an albumin, etc. through a hydrolysable or unhydrolysable bond, thus providing the modified insulin analogue with different physical, chemical, and biological properties.

[0316] In accordance with one embodiment, the C-terminal amino acid of the C_{L} may be selected from the group consisting of glycine-lysine, glycine-arginine, arginine-arginine, lysine-lysine, arginine-lysine, lysine-arginine, proline-glutamine-threonine, proline-glutamine-lysine, or proline-glutamine-arginine. In accordance with one embodiment, the C-terminal amino acid of the C_{L} is selected from a lysine or arginine.

[0317] In an embodiment, C_{L}is

(SEQ ID NO: 384)
GX_{IN116}X_{IN117}X_{IN118}X_{IN119}X_{IN120}X_{IN121}X_{IN122}X_{IN123}X_{IN124}X_{IN125}X_{IN126},

wherein

[0318] X_{IN116} is a lysine, cysteine, serine, or alanine; X_{IN117} is a glycine, lysine, or serine; X_{IN118} is a lysine or serine; X_{IN119} is a lysine or serine; X_{IN120} is a lysine, serine, or alanine; X_{IN121} is a glycine, lysine, arginine, alanine, proline, or absent; X_{IN122} is a glycine, alanine, arginine, lysine, glutamine, proline, or absent; X_{IN123} is an arginine, lysine, glycine, alanine, proline, threonine, glutamine, or absent; X_{IN124} is a proline, glutamine, lysine, glycine, arginine, or absent; X_{IN125} is a glutamine, threonine, lysine, glycine, arginine, or absent; X_{IN126} is a threonine, arginine, lysine, or absent;

[0319] In a particular embodiment, C_{L}

(SEQ ID NO: 385)
GAGSSSAAAPQT,
(SEQ ID NO: 386)
GSGSSSAAAPQT,
(SEQ ID NO: 387)
GSGSSSAAPQT,
(SEQ ID NO: 388)
GSGSSSAPQT,
or
(SEQ ID NO: 389)
GSGSSAPQT.

[0320] In another embodiment, the structure of the amino acid sequence of the single chain insulin receptor binding polypeptide is:

(SEQ ID NO: 390)
FVNQHLC_{[1]}GSHLVEALYLVC_{[2]}GERGFFX_{IN111}X_{IN112}X_{IN113}X_{IN114}
X_{IN115}-C_{L}-GIVEQC_{[3]}C_{[4]}TSIC_{[5]}SLYQLENYC_{[6]}N,

wherein each of the variables is defined as the above.

[0321] The present invention further provides a compound modified on the basis of the insulin receptor binding polypeptide for further increasing the in vivo circulation time for exerting the function of the compound. Said modification is one in which the modified side chain is linked to the α-amino group of the amino acid residue at the N-terminus of the B chain of the double-chain compound according to the present invention or at the N-terminus of the single chain compound according to the present invention, or to the ε-amino group of the lysine present in the double- or single chain compound of the present invention.

[0322] In one embodiment, the compound comprises an A chain and a B chain, wherein

[0323] the amino acid sequence of the A chain is:

(SEQ ID NO: 391)
GIVEQC_{[3]}C_{[4]}TSIC_{[5]}X_{IN412}LX_{IN414}X_{IN415}LX_{IN417}X_{IN418}
YC_{[6]}X_{IN421}X_{IN422},

[0324] the amino acid sequence of the B chain is:

(SEQ ID NO: 392)
X_{IN423-426}HLC_{[1]}GSHLVEALYLVC_{[2]}GERGFX_{IN447}X_{IN448}X_{IN449}X_{IN450}
X_{IN451}X_{IN452}X_{IN453},

[0325] [1] to [6] in the compound indicate the Nos of the cysteines; 3 pairs of disulfide bonds are formed with six cysteines in the compound, in which the A chain and the B chain are connected by two pairs of interchain disulfide bonds, a pair of intrachain disulfide bond is present in the A chain, and the specific positions for the three pairs of the disulfide bonds are: C_{[1]} and C_{[4]} forming a disulfide bond, C_{[2]} and C_{[6]} forming a disulfide bond, and C_{[3]} and C_{[5]} forming a disulfide bond;
[0326] in which X_{IN412} is a serine or a structure of general formula 1; X_{IN414} is a tyrosine or a structure of general formula 1; X_{IN415} is a glutamine or a structure of general formula 1; X_{IN417} is a glutamic acid or a structure of general formula 1; X_{IN418} is an asparagine or a structure of general formula 1; X_{IN421} is an asparagine, alanine, or glycine; X_{IN422} is a lysine, general formula 3, arginine-general formula 3 or absent; X_{IN423-426} is a glycine-proline-glutamic acid tripeptide, U_{L}-glycine-proline-glutamic acid, a tetrapeptide of phenylalanine-valine-asparagine-glutamine or U_{L}-phenylalanine-valine-asparagine-glutamine; X_{IN447} is a tyrosine or phenylalanine; X_{IN448} is a —NH₂, phenylalanine, tyrosine, or absent; X_{IN449} is a threonine, asparagine, or absent; X_{IN450} is a lysine, arginine, glutamic acid, aspartic acid, proline, or absent; X_{IN451} is a proline, lysine, arginine, glutamic acid, aspartic acid, or absent, or is a structure of general formula 1 or 3; X_{IN452} is a threonine, lysine, or absent, or is a structure of general formula 1 or 3; X_{IN453} is a lysine or absent, or is a structure of general formula 3; U_{L} is defined as herein.

[0327] In another embodiment, the structure of the amino acid sequence of the single-stranded compound is:

(SEQ ID NO: 393)
U_{L}-X_{IN300}HLC_{[1]}GSHLVEALYLVC_{[2]}GERGFX_{IN301}X_{IN302}X_{IN303}
X_{IN304}X_{IN305}X_{IN306}GX_{IN307}X_{IN308}X_{IN309}X_{IN310}X_{IN311}X_{IN312}X_{IN313}
X_{IN314}X_{IN315}X_{IN316}X_{IN317}GIVEQC_{[3]}C_{[4]}X_{IN318}SIC_{[5]}X_{IN319}
LX_{IN320}X_{IN321}LX_{IN322}X_{IN323}YC_{[6]}X_{IN324}X_{IN325},

in which

[0328] X_{IN300} is a tetrapeptide of phenylalanine-valine-asparagine-glutamine, a tripeptide of valine-asparagine-glutamine, a dipeptide of asparagine-glutamine, glutamine, a sequence wherein any one of the amino acid residues in the sequence of the tetrapeptide, tripeptide, and dipeptide is substituted with a lysine or arginine, or absent; X_{IN301} is a phenylalanine, histidine or tyrosine; X_{IN302} is a —NH₂, tyrosine, phenylalanine, or absent; X_{IN303} is a threonine, asparagine, or absent; X_{IN304} is a proline, lysine, glutamic acid, aspartic acid, or absent; X_{IN305} is an aspartic acid, glutamic acid, proline, arginine, lysine, absent or a structure of general formula 1; X_{IN306} is a threonine, a structure of general formula 1, or absent; X_{IN307} is a serine, alanine, glycine, lysine, a structure of general formula 1, or absent; X_{IN308} is a glycine, a structure of general formula 1, or absent; X_{IN309} is a lysine, glycine, serine, a structure of general formula 1, or absent; X_{IN310} is a lysine, glycine, serine, a structure of general formula 1, or absent; X_{IN311} is a lysine, glycine, serine, alanine, a structure of general formula 1, or absent; X_{IN312} is a lysine, arginine, alanine, proline, glycine, a structure of general formula 1, or absent; X_{IN313} is a glycine, alanine, arginine, lysine, glutamine, proline, a structure of general formula 1, or absent; X_{IN314} is an arginine, alanine, proline, threonine, glutamine, glycine, a structure of general formula 1, or absent; X_{IN315} is a proline, glutamine, arginine, glycine, absent, or a structure of general formula 1; X_{IN316} is a glutamine, threonine, arginine, glycine, absent, or a structure of general formula 1; X_{IN317} is a threonine, arginine, lysine, or absent; X_{IN318} is a threonine, histidine, arginine or a structure of general formula 1; X_{IN319} is a serine or a structure of general formula 1; X_{IN320} is a tyrosine or a structure of general formula 1; X_{IN321} is a glutamine or a structure of general formula 1; X_{IN322} is a glutamic acid or a structure of general formula 1; X_{IN323} is an asparagine or a structure of general formula 1; X_{IN324} is an aspartic acid, glycine, alanine, or a structure of general formula 1; X_{IN325} is a lysine, general formula 3, arginine-general formula 3, or absent; U_{L} and the structures of general formulas 1 and 3 are defined as herein.

[0329] In another embodiment, the compound has another single chain structure, the amino acid sequence of which is:

(SEQ ID NO: 394)
U_{L}-FVNQHLC_{[1]}GSHLVEALYLVC_{[2]}GERGFFX_{IN302}X_{IN303}
X_{IN304}X_{IN305}X_{IN306}GX_{IN307}X_{IN308}X_{IN309}X_{IN310}X_{IN311}X_{IN312}
X_{IN313}X_{IN314}X_{IN315}X_{IN316}X_{IN317}GIVEQC_{[3]}C_{[4]}TSIC_{[5]}SLY
QLENYC_{[6]}NX_{IN325},

wherein each of the variables is defined as herein.

[0330] The insulin receptor binding polypeptide and the interleukin-1 receptor antagonistic protein are able to protect pancreas islet β-cells by similar or distinct mechanisms, thereby treating diabetes mellitus. Accordingly, the fusion protein formed by joining the two polypeptides may attain a therapeutic effect more excellent than that with either of the polypeptides alone, due to the synergistic effect by the two polypeptides. Furthermore, one of the causes for the onset of diabetes is often the inflammation in and around the tissues where the insulin receptor is primarily distributed. The insulin receptor binding polypeptide can serve as a target for the fusion protein and enrich the interleukin-1 receptor antagonistic protein in the tissues, more effectively exerting actions such as anti-inflammation, etc.

[0331] The insulin receptor binding polypeptide is linked to the interleukin-1 receptor antagonistic protein in various linkages through an alternative linking group (or spacer group).

[0332] (1) The insulin receptor binding polypeptide is lined to the interleukin-1 receptor antagonistic protein in the following form (from left to right corresponding to the amino acid sequence from N-terminus to C-terminus):
[0333] the insulin receptor binding polypeptide—linking group (or spacer group)-interleukin-1 receptor antagonistic protein; or

[0334] the interleukin-1 receptor antagonistic protein-linking group (or spacer group)—the insulin receptor binding polypeptide;

[0335] In one embodiment, the sequence of the fusion protein is

(SEQ ID NO: 395)
U_{L}-X_{IN107}HLC_{[1]}GSX_{IN108}LVEALYLVC_{[2]}GEX_{IN109}GFX_{IN110}X_{IN111}
X_{IN112}X_{IN113}X_{IN114}X_{IN115}-C_{L}-GIVEQC_{[3]}C_{[4]}X_{IN127}SIC_{[5]}SLYQL
ENYC_{[6]}X_{IN128}X_{IN129}-Lⱼ-X_{IL0}RPSGRKSSKMQAFRIWDVNQKTFYL
RNNQLVAGYLQGPNVNLEEKIDVVPIEPHALFLGIHGGKMX_{IL66}
LSX_{IL69}VKSGDETRLQLEAVX_{IL84}ITDLSENRKQDKRFAFIRSDSGP
TTSFESAAX_{IL116}PGWFLX_{IL122}TAMEADQPVSLTNMPDEGVMVTKFY
FQEDE,
or
(SEQ ID NO: 396)
U_{L}-X_{IN107}HLC_{[1]}GSHLVEALYLVC_{[2]}GERGFX_{IN110}X_{IN111}X_{IN112}X_{IN113}
X_{IN114}X_{IN115}-C_{L}-GIVEQC_{[3]}C_{[4]}TSIC_{[5]}SLYQLENYC_{[6]}N-
(GGGGS)ₘ-X_{L}-(GGGGS)ₙ-X_{IL0}RPSGRKSSKMQAFRIWDVNQKTFYL
RNNQLVAGYLQGPNVNLEEKIDVVPIEPHALFLGIHGGKMX_{IL66}LSX_{IL69}
VKSGDETRLQLEAVX_{IL84}ITDLSENRKQDKRFAFIRSDSGPTTSFESAA
X_{IL116}PGWFLX_{IL122}TAMEADQPVSLTNMPDEGVMVTKFYFQEDE,
or
(SEQ ID NO: 397)
U_{L}-FVNQHLC_{[1]}GSHLVEALYLVC_{[2]}GERGFFYTPKT-C_{L}-GIVEQC_{[3]}
C_{[4]}TSIC_{[5]}SLYQLENYC_{[6]}N-(GGGGS)ₘ-X_{L}-(GGGGS)ₙ-X_{IL0}RPS
GRKSSKNIQAFRIWDVNQKTFYLRNNQLVAGYLQGPNVNLEEKIDVVP
IEPHALFLGIHGGKMX_{IL66}LSX_{IL69}VKSGDETRLQLEAVNITDLSENRK
QDKRFAFIRSDSGPTTSFESAAX_{IL116}PGWFLX_{IL122}TAMEADQPVSLTN
MPDEGVMVTKFYFQEDE,
or
(SEQ ID NO: 398)
U_{L}-FVNQHLC_{[1]}GSHLVEALYLVC_{[2]}GERGFFYTPKT-C_{L}-GIVEQC_{[3]}
C_{[4]}TSIC_{[5]}SLYQLENYC_{[6]}N-(GGGGS)ₙ-X_{IL0}RPSGRKSSKNIQAFR
IWDVNQKTFYLRNNQLVAGYLQGPNVNLEEKIDVVPIEPHALFLGIHG
GKNIX_{IL66}LSX_{IL69}VKSGDETRLQLEAVNITDLSENRKQDKRFAFIRSD
SGPTTSFESAAX_{IL116}PGWFLX_{IL122}TAMEADQPVSLTNMPDEGVMVTKF
YFQEDE;
or
(SEQ ID NO: 399)
U_{L}-X_{IL0}RPSGRKSSKMQAFRIWDVNQKTFYLRNNQLVAGYLQGPNVNLE
EKIDVVPIEPHALFLGIHGGKMX_{IL66}LSX_{IL69}VKSGDETRLQLEAVX_{IL84}
ITDLSENRKQDKRFAFIRSDSGPTTSFESAAX_{IL116}PGWFLX_{IL122}TAME
ADQPVSLTNMPDEGVMVTKFYFQEDE-Lⱼ-X_{IN107}HLC_{[1]}GSX_{IN108}LVEA
LYLVC_{[2]}GEX_{IN109}GFX_{IN110}X_{IN111}X_{IN112}X_{IN113}X_{IN114}X_{IN115}-C_{L}-GIVEQ
C_{[3]}C_{[4]}X_{IN127}SIC_{[5]}SLYQLENYC_{[6]}X_{IN128}X_{IN129};
or
(SEQ ID NO: 400)
U_{L}-X_{IL0}RPSGRKSSKMQAFRIWDVNQKTFYLRNNQLVAGYLQGPNVNLEE
KIDVVPIEPHALFLGIHGGKMX_{IL66}LSX_{IL69}VKSGDETRLQLEAVX_{IL84}IT
DLSENRKQDKRFAFIRSDSGPTTSFESAAX_{IL116}PGWFLX_{IL122}TAMEADQ
PVSLTNMPDEGVMVTKFYFQEDE-(GGGGS)ₘ-X_{L}-(GGGGS)ₙ-X_{IN107}
HLC_{[1]}GSHLVEALYLVC_{[2]}GERGFX_{IN110}X_{IN111}X_{IN112}X_{IN113}X_{IN114}X_{IN115}-
C_{L}-GIVEQC_{[3]}C_{[4]}TSIC_{[5]}SLYQLENYC_{[6]}X_{IN128}X_{IN129},
or
(SEQ ID NO: 401)
U_{L}-X_{IL0}RPSGRKSSKMQAFRIWDVNQKTFYLRNNQLVAGYLQGPNVNLEE
KIDVVPIEPHALFLGIHGGKMX_{IL66}LSX_{IL69}VKSGDETRLQLEAVNITDL
SENRKQDKRFAFIRSDSGPTTSFESAAX_{IL116}PGWFLX_{IL122}TAMEADQPV
SLTNMPDEGVMVTKFYFQEDE-(GGGGS)ₘ-X_{L}-(GGGGS)ₙ-FVNQHL
C_{[1]}GSHLVEALYLVC_{[2]}GERGFFYTPKT-C_{L}-GIVEQC_{[3]}C_{[4]}TSIC_{[5]}
SLYQLENYC_{[6]}N;
or
(SEQ ID NO: 402)
U_{L}-X_{IL0}RPSGRKSSKMQAFRIWDVNQKTFYLRNNQLVAGYLQGPNVNLEE
KIDVVPIEPHALFLGIHGGKMX_{IL66}LSX_{IL69}VKSGDETRLQLEAVNITDL
SENRKQDKRFAFIRSDSGPTTSFESAAX_{IL116}PGWFLX_{IL122}TAMEADQPV
SLTNMPDEGVMVTKFYFQEDE-(GGGGS)ₙ-FVNQHLC_{[1]}GSHLVEALYL
VC_{[2]}GERGFFYTPKT-C_{L}-GIVEQC_{[3]}C_{[4]}TSIC_{[5]}SLYQLENYC_{[6]}N;
or
(SEQ ID NO: 403)
U_{L}-X_{IL0}RPSGRKSSKMQAFRIWDVNQKTFYLRNNQLVAGYLQGPNVNLE
EKIDVVPIEPHALFLGIHGGKMX_{IL66}LSX_{IL69}VKSGDETRLQLEAVX_{IL84}
ITDLSENRKQDKRFAFIRSDSGPTTSFESAAX_{IL116}PGWFLX_{IL122}TAME
ADQPVSLTNMPDEGVMVTKFYFQEDE-(GGGGS)ₘ-X_{L}-(GGGGS)ₙ-
FVNQHLCGSHLVEALYLVCGERGFFYTPKTGSGSSSAAAPQTGIVEQC
CTSICSLYQLENYCN;

[0336] in the above-mentioned sequences, m and n are each 0, 1, 2, 3, 4, 5, or 6 and other variables are defined as herein;

[0337] [1] to [6] indicate the Nos. of the cysteines; 3 pairs of disulfide bonds are formed by six cysteines in the compound, in which the A chain and the B chain are connected by two pairs of interchain disulfide bonds, a pair of intrachain disulfide bond is present in the A chain, and the specific positions for the three pairs of the disulfide bonds are: C_{[1]} and C_{[4]} forming a disulfide bond, C_{[2]} and C_{[6]} forming a disulfide bond, and C_{[3]} and C_{[5]} forming a disulfide bond.

[0338] The fusion protein consisting of the insulin receptor binding polypeptide and the interleukin-1 receptor antagonistic protein is selected from:

IN-1:
(SEQ ID NO: 85)
FVNQHLC_{[1]}GSHLVEALYLVC_{[2]}GERGFFYTPKTGSGSSSAAAPQTGIVEQC_{[3]}C_{[4]}TSIC
_{[5]}SLYQLENYC_{[6]}NRPSGRKSSKMQAFRIWDVNQKTFYLRNNQLVAGYLQGPNVNLEEKI
DVVPIEPHALFLGIHGGKMCLSCVKSGDETRLQLEAVNITDLSENRKQDKRFAFIRSDSGP
TTSFESAACPGWFLCTAMEADQPVSLTNMPDEGVMVTKFYFQEDE;
IN-2:
(SEQ ID NO: 86)
FVNQHLC_{[1]}GSHLVEALYLVC_{[2]}GERGFFYTPKTGSGSSSAAAPQTGIVEQC_{[3]}C_{[4]}TSIC
_{[5]}SLYQLENYC_{[6]}NRPSGRKSSKMQAFRIWDVNQKTFYLRNNQLVAGYLQGPNVNLEEKI
DVVPIEPHALFLGIHGGKMCLSCVKSGDETRLQLEAVNITDLSENRKQDKRFAFIRSDSGP
TTSFESAASPGWFLCTAMEADQPVSLTNMPDEGVMVTKFYFQEDE;
IN-3:
(SEQ ID NO: 87)
FVNQHLC_{[1]}GSHLVEALYLVC_{[2]}GERGFFYTPKTGSGSSSAAAPQTGIVEQC_{[3]}C_{[4]}TSIC
_{[5]}SLYQLENYC_{[6]}NRPSGRKSSKMQAFRIWDVNQKTFYLRNNQLVAGYLQGPNVNLEEKI
DVVPIEPHALFLGIHGGKMSLSSVKSGDETRLQLEAVNITDLSENRKQDKRFAFIRSDSGP
TTSFESAASPGWFLSTAMEADQPVSLTNMPDEGVMVTKFYFQEDE;
IN-4:
(SEQ ID NO: 88)
FVNQHLC_{[1]}GSHLVEALYLVC_{[2]}GERGFFYTPKTGSGSSSAAAPQTGIVEQC_{[3]}C_{[4]}TSIC
_{[5]}SLYQLENYC_{[6]}NGGGGSRPSGRKSSKMQAFRIWDVNQKTFYLRNNQLVAGYLQGPNV
NLEEKIDVVPIEPHALFLGIHGGKMCLSCVKSGDETRLQLEAVNITDLSENRKQDKRFAFI
RSDSGPTTSFESAACPGWFLCTAMEADQPVSLTNMPDEGVMVTKFYFQEDE;
IN-5:
(SEQ ID NO: 89)
FVNQHLC_{[1]}GSHLVEALYLVC_{[2]}GERGFFYTPKTGSGSSSAAAPQTGIVEQC_{[3]}C_{[4]}TSIC
_{[5]}SLYQLENYC_{[6]}NGGGGSRPSGRKSSKMQAFRIWDVNQKTFYLRNNQLVAGYLQGPNV
NLEEKIDVVPIEPHALFLGIHGGKMCLSCVKSGDETRLQLEAVNITDLSENRKQDKRFAFI
RSDSGPTTSFESAASPGWFLCTAMEADQPVSLTNMPDEGVMVTKFYFQEDE;
IN-6:
(SEQ ID NO: 90)
FVNQHLC_{[1]}GSHLVEALYLVC_{[2]}GERGFFYTPKTGSGSSSAAAPQTGIVEQC_{[3]}C_{[4]}TSIC
_{[5]}SLYQLENYC_{[6]}NGGGGSRPSGRKSSKMQAFRIWDVNQKTFYLRNNQLVAGYLQGPNV
NLEEKIDVVPIEPHALFLGIHGGKMSLSSVKSGDETRLQLEAVNITDLSENRKQDKRFAFI
RSDSGPTTSFESAASPGWFLSTAMEADQPVSLTNMPDEGVMVTKFYFQEDE;
IN-7:
(SEQ ID NO: 91)
FVNQHLC_{[1]}GSHLVEALYLVC_{[2]}GERGFFYTPKTGSGSSSAAAPQTGIVEQC_{[3]}C_{[4]}TSIC
_{[5]}SLYQLENYC_{[6]}NGGGGSGGGGSRPSGRKSSKMQAFRIWDVNQKTFYLRNNQLVAGYL
QGPNVNLEEKIDVVPIEPHALFLGIHGGKMCLSCVKSGDETRLQLEAVNITDLSENRKQD
KRFAFIRSDSGPTTSFESAACPGWFLCTAMEADQPVSLTNMPDEGVMVTKFYFQEDE;
IN-8:
(SEQ ID NO: 92)
FVNQHLC_{[1]}GSHLVEALYLVC_{[2]}GERGFFYTPKTGSGSSSAAAPQTGIVEQC_{[3]}C_{[4]}TSIC
_{[5]}SLYQLENYC_{[6]}NGGGGSGGGGSRPSGRKSSKMQAFRIWDVNQKTFYLRNNQLVAGYL
QGPNVNLEEKIDVVPIEPHALFLGIHGGKMCLSCVKSGDETRLQLEAVNITDLSENRKQD
KRFAFIRSDSGPTTSFESAASPGWFLCTAMEADQPVSLTNMPDEGVMVTKFYFQEDE;
IN-9:
(SEQ ID NO: 93)
FVNQHLC_{[1]}GSHLVEALYLVC_{[2]}GERGFFYTPKTGSGSSSAAAPQTGIVEQC_{[3]}C_{[4]}TSIC
_{[5]}SLYQLENYC_{[6]}NGGGGSGGGGSRPSGRKSSKMQAFRIWDVNQKTFYLRNNQLVAGYL
QGPNVNLEEKIDVVPIEPHALFLGIHGGKMSLSSVKSGDETRLQLEAVNITDLSENRKQD
KRFAFIRSDSGPTTSFESAASPGWFLSTAMEADQPVSLTNMPDEGVMVTKFYFQEDE;
IN-10:
(SEQ ID NO: 94)
FVNQHLC_{[1]}GSHLVEALYLVC_{[2]}GERGFFYTPKTGSGSSSAAAPQTGIVEQC_{[3]}C_{[4]}TSIC
_{[5]}SLYQLENYC_{[6]}NGGGGSGGGGSGGGGSRPSGRKSSKMQAFRIWDVNQKTFYLRNNQL
VAGYLQGPNVNLEEKIDVVPIEPHALFLGIHGGKMCLSCVKSGDETRLQLEAVNITDLSE
NRKQDKRFAFIRSDSGPTTSFESAACPGWFLCTAMEADQPVSLTNMPDEGVMVTKFYFQ
EDE;
IN-11:
(SEQ ID NO: 95)
FVNQHLC_{[1]}GSHLVEALYLVC_{[2]}GERGFFYTPKTGSGSSSAAAPQTGIVEQC_{[3]}C_{[4]}TSIC
_{[5]}SLYQLENYC_{[6]}NGGGGSGGGGSGGGGSRPSGRKSSKMQAFRIWDVNQKTFYLRNNQL
VAGYLQGPNVNLEEKIDVVPIEPHALFLGIHGGKMCLSCVKSGDETRLQLEAVNITDLSE
NRKQDKRFAFIRSDSGPTTSFESAASPGWFLCTAMEADQPVSLTNMPDEGVMVTKFYFQ
EDE;
IN-12:
(SEQ ID NO: 96)
FVNQHLC_{[1]}GSHLVEALYLVC_{[2]}GERGFFYTPKTGSGSSSAAAPQTGIVEQC_{[3]}C_{[4]}TSIC
_{[5]}SLYQLENYC_{[6]}NGGGGSGGGGSGGGGSRPSGRKSSKMQAFRIWDVNQKTFYLRNNQL
VAGYLQGPNVNLEEKIDVVPIEPHALFLGIHGGKMSLSSVKSGDETRLQLEAVNITDLSE
NRKQDKRFAFIRSDSGPTTSFESAASPGWFLSTAMEADQPVSLTNMPDEGVMVTKFYFQ
EDE;
IN-13:
(SEQ ID NO: 97)
FVNQHLC_{[1]}GSHLVEALYLVC_{[2]}GERGFFGSGSSSAAAPQTGIVEQC_{[3]}C_{[4]}TSIC_{[5]}SLY
QLENYC_{[6]}NRPSGRKSSKMQAFRIWDVNQKTFYLRNNQLVAGYLQGPNVNLEEKIDVVP
IEPHALFLGIHGGKMCLSCVKSGDETRLQLEAVNITDLSENRKQDKRFAFIRSDSGPTTSF
ESAACPGWFLCTAMEADQPVSLTNMPDEGVMVTKFYFQEDE;
IN-14:
(SEQ ID NO: 98)
FVNQHLC_{[1]}GSHLVEALYLVC_{[2]}GERGFFGSGSSSAAAPQTGIVEQC_{[3]}C_{[4]}TSIC_{[5]}SLY
QLENYC_{[6]}NRPSGRKSSKMQAFRIWDVNQKTFYLRNNQLVAGYLQGPNVNLEEKIDVVP
IEPHALFLGIHGGKMCLSCVKSGDETRLQLEAVNITDLSENRKQDKRFAFIRSDSGPTTSF
ESAASPGWELCTAMEADQPVSLTNMPDEGVMVTKEYEQEDE;
IN-15:
(SEQ ID NO: 99)
FVNQHLC_{[1]}GSHLVEALYLVC_{[2]}GERGFFGSGSSSAAAPQTGIVEQC_{[3]}C_{[4]}TSIC_{[5]}SLY
QLENYC_{[6]}NRPSGRKSSKMQAFRIWDVNQKTFYLRNNQLVAGYLQGPNVNLEEKIDVVP
IEPHALFLGIHGGKMSLSSVKSGDETRLQLEAVNITDLSENRKQDKRFAFIRSDSGPTTSFE
SAASPGWFLSTAMEADQPVSLTNMPDEGVMVTKFYFQEDE;
IN-16:
(SEQ ID NO: 100)
FVNQHLC_{[1]}GSHLVEALYLVC_{[2]}GERGFFGSGSSSAAAPQTGIVEQC_{[3]}C_{[4]}TSIC_{[5]}SLY
QLENYC_{[6]}NGGGGSRPSGRKSSKMQAFRIWDVNQKTFYLRNNQLVAGYLQGPNVNLEE
KIDVVPIEPHALFLGIHGGKMCLSCVKSGDETRLQLEAVNITDLSENRKQDKRFAFIRSDS
GPTTSFESAACPGWFLCTAMEADQPVSLTNMPDEGVMVTKFYFQEDE;
IN-17:
(SEQ ID NO: 101)
FVNQHLC_{[1]}GSHLVEALYLVC_{[2]}GERGFFGSGSSSAAAPQTGIVEQC_{[3]}C_{[4]}TSIC_{[5]}SLY
QLENYC_{[6]}NGGGGSRPSGRKSSKMQAFRIWDVNQKTFYLRNNQLVAGYLQGPNVNLEE
KIDVVPIEPHALFLGIHGGKMCLSCVKSGDETRLQLEAVNITDLSENRKQDKRFAFIRSDS
GPTTSFESAASPGWFLCTAMEADQPVSLTNMPDEGVMVTKFYFQEDE;
IN-18:
(SEQ ID NO: 102)
FVNQHLC_{[1]}GSHLVEALYLVC_{[2]}GERGFFGSGSSSAAAPQTGIVEQC_{[3]}C_{[4]}TSIC_{[5]}SLY
QLENYC_{[6]}NGGGGSRPSGRKSSKMQAFRIWDVNQKTFYLRNNQLVAGYLQGPNVNLEE
KIDVVPIEPHALELGIHGGKMSLSSVKSGDETRLQLEAVNITDLSENRKQDKREAFIRSDS
GPTTSFESAASPGWFLSTAMEADQPVSLTNMPDEGVMVTKFYFQEDE;
IN-19:
(SEQ ID NO: 103)
FVNQHLC_{[1]}GSHLVEALYLVC_{[2]}GERGFFGSGSSSAAAPQTGIVEQC_{[3]}C_{[4]}TSIC_{[5]}SLY
QLENYC_{[6]}NGGGGSGGGGSRPSGRKSSKMQAFRIWDVNQKTFYLRNNQLVAGYLQGPN
VNLEEKIDVVPIEPHALFLGIHGGKMCLSCVKSGDETRLQLEAVNITDLSENRKQDKRFA
FIRSDSGPTTSFESAACPGWFLCTAMEADQPVSLTNMPDEGVMVTKFYFQEDE;
IN-20:
(SEQ ID NO: 104)
FVNQHLC_{[1]}GSHLVEALYLVC_{[2]}GERGFFGSGSSSAAAPQTGIVEQC_{[3]}C_{[4]}TSIC_{[5]}SLY
QLENYC_{[6]}NGGGGSGGGGSRPSGRKSSKMQAFRIWDVNQKTFYLRNNQLVAGYLQGPN
VNLEEKIDVVPIEPHALFLGIHGGKMCLSCVKSGDETRLQLEAVNITDLSENRKQDKRFA
FIRSDSGPTTSFESAASPGWFLCTAMEADQPVSLTNMPDEGVMVTKFYFQEDE;
IN-21:
(SEQ ID NO: 105)
FVNQHLC_{[1]}GSHLVEALYLVC_{[2]}GERGFFGSGSSSAAAPQTGIVEQC_{[3]}C_{[4]}TSIC_{[5]}SLY
QLENYC_{[6]}NGGGGSGGGGSRPSGRKSSKMQAFRIWDVNQKTFYLRNNQLVAGYLQGPN
VNLEEKIDVVPIEPHALELGIHGGKMSLSSVKSGDETRLQLEAVNITDLSENRKQDKREAF
IRSDSGPTTSFESAASPGWELSTAMEADQPVSLTNMPDEGVMVTKEYEQEDE;
IN-22:
(SEQ ID NO: 106)
FVNQHLC_{[1]}GSHLVEALYLVC_{[2]}GERGFFGSGSSSAAAPQTGIVEQC_{[3]}C_{[4]}TSIC_{[5]}SLY
QLENYC_{[6]}NGGGGSGGGGSGGGGSRPSGRKSSKMQAFRIWDVNQKTFYLRNNQLVAGY
LQGPNVNLEEKIDVVPIEPHALELGIHGGKMCLSCVKSGDETRLQLEAVNITDLSENRKQ
DKRFAFIRSDSGPTTSFESAACPGWFLCTAMEADQPVSLTNMPDEGVMVTKFYFQEDE;
IN-23:
(SEQ ID NO: 107)
FVNQHLC_{[1]}GSHLVEALYLVC_{[2]}GERGFFGSGSSSAAAPQTGIVEQC_{[3]}C_{[4]}TSIC_{[5]}SLY
QLENYC_{[6]}NGGGGSGGGGSGGGGSRPSGRKSSKMQAFRIWDVNQKTFYLRNNQLVAGY
LQGPNVNLEEKIDVVPIEPHALELGIHGGKMCLSCVKSGDETRLQLEAVNITDLSENRKQ
DKRFAFIRSDSGPTTSFESAASPGWFLCTAMEADQPVSLTNMPDEGVMVTKFYFQEDE;
IN-24:
(SEQ ID NO: 108)
FVNQHLC_{[1]}GSHLVEALYLVC_{[2]}GERGFFGSGSSSAAAPQTGIVEQC_{[3]}C_{[4]}TSIC_{[5]}SLY
QLENYC_{[6]}NGGGGSGGGGSGGGGSRPSGRKSSKMQAFRIWDVNQKTFYLRNNQLVAGY
LQGPNVNLEEKIDVVPIEPHALELGIHGGKMSLSSVKSGDETRLQLEAVNITDLSENRKQ
DKRFAFIRSDSGPTTSFESAASPGWFLSTAMEADQPVSLTNMPDEGVMVTKFYFQEDE;
IN-25:
(SEQ ID NO: 109)
FVNQHLC_{[1]}GSHLVEALYLVC_{[2]}GERGFFYTPKTGSGSSSAAAPQTGIVEQC_{[3]}C_{[4]}TSIC_{[5]}SL
YQLENYC_{[6]}NGGGGSGGGGSRPSGRKSSKMQAFRIWDVNQKTFYLRNNQLVAGYLQGP
NVNLEEKIDVVPIEPHALELGIHGGKMCLSCVKSGDETRLQLEAVNITDLSENRKQDKRE
AFIRSDSGPTTSPESAAC[S-maleimide-(CH₂)₄-NH-(N^{a}-(HOOC(CH₂)₁₄CO)-γ-Glu)]
PGWFLCTAMEADQPVSLTNMPDEGVMVTKFYFQEDE (S is the sulphur atom on the
side chain of a cysteine residue);
IN-26:
(SEQ ID NO: 110)
FVNQHLC_{[1]}GSHLVEALYLVC_{[2]}GERGFFYTPKTGSGSSSAAAPQTGIVEQC_{[3]}C_{[4]}TSIC_{[5]}SL
YQLENYC_{[6]}NGGGGSGGGGSRPSGRKSSKMQAFRIWDVNQKTFYLRNNQLVAGYLQGP
NVNLEEKIDVVPIEPHALFLGIHGGKMCLSCVKSGDETRLQLEAVC[S-CH₂-CONH-(CH₂C
H₂O)₂-(CH₂)₂-NH-(N^{a}-(HOOC(CH₂)₁₄CO)-γ-Glu)]ITDLSENRKQDKRFAFIRSDS
GPTTSFESAASPGWFLCTAMEADQPVSLTNMPDEGVMVTKFYFQEDE (S is the
sulphur atom on the side chain of a cysteine residue);
IN-27:
(SEQ ID NO: 111)
FVNQHLC_{[1]}GSHLVEALYLVC_{[2]}GERGFFGSGSSSAAAPQTGIVEQC_{[3]}C_{[4]}TSIC_{[5]}SLYQLEN
YC_{[6]}NGGGGSGGGGSRPSGRKSSKMQAFRIWDVNQKTFYLRNNQLVAGYLQGPNVNLE
EKIDVVPIEPHALFLGIHGGKMCLSCVKSGDETRLQLEAVNITDLSENRKQDKRFAFIRSD
SGPTTSFESAAC(S-CH₂-CONH-PEG20K)PGWFLCTAMEADQPVSLTNMPDEGVMVTKE
YFQEDE (S is the sulphur atom on the side chain of a cysteine
residue);
IN-28:
(SEQ ID NO: 112)
FVNQHLC_{[1]}GSHLVEALYLVC_{[2]}GERGFFGSGSSSAAAPQTGIVEQC_{[3]}C_{[4]}TSIC_{[5]}SLYQLEN
YC_{[6]}NGGGGSGGGGSRPSGRKSSKMQAFRIWDVNQKTFYLRNNQLVAGYLQGPNVNLE
EKIDVVPIEPHALFLGIHGGKMCLSCVKSGDETRLQLEAVC(S-maleimide-(CH₂)₁₅-
COOH)ITDLSENRKQDKRFAFIRSDSGPTTSFESAASPGWELCTAMEADQPVSLTNMPDE
GVMVTKFYFQEDE (S is the sulphur atom on the side chain of a
cysteine residue);
IN-62
(SEQ ID NO: 146)
RPSGRKSSKMQAFRIWDVNQKTFYLRNNQLVAGYLQGPNVNLEEKIDVVPIEPHAL
FLGIHGGKMCLSCVKSGDETRLQLEAVNITDLSENRKQDKRFAFIRSDSGPTTSELSAACP
GWELCTAMEADQPVSLTNMPDEGVMVTKEYFQEDEGGGGSGGGGSFVNQHLC_{[1]}GSHL
VEALYLVC_{[2]}GERGFFYTPKTGSGSSSAAAPQTGIVEQC_{[3]}C_{[4]}TSIC_{[5]}SLYQLENYC_{[6]}N;
IN-63
(SEQ ID NO: 147)
RPSGRKSSKMQAFRIWDVNQKTFYLRNNQLVAGYLQGPNVNLEEKIDVVPIEPHAL
FLGIHGGKMCLSCVKSGDETRLQLEAVNITDLSENRKQDKRFAFIRSDSGPTTSPESAASP
GWELCTAMEADQPVSLTNMPDEGVMVTKEYFQEDEGGGGSGGGGSFVNQHLC_{[1]}GSHL
VEALYLVC_{[2]}GERGFFYTPKTGSGSSSAAAPQTGIVEQC_{[3]}C_{[4]}TSIC_{[5]}SLYQLENYC_{[6]}N;
IN-64:
(SEQ ID NO: 148)
RPSGRKSSKMQAFRIWDVNQKTFYLRNNQLVAGYLQGPNVNLEEKIDVVPIEPHAL
FLGIHGGKMSLSSVKSGDETRLQLEAVNITDLSENRKQDKRFAFIRSDSGPTTSFESAASP
GWFLSTAMEADQPVSLTNMPDEGVMVTKEYFQEDEGGGGSGGGGSFVNQHLC_{[1]}GSHL
VEALYLVC_{[2]}GERGFFYTPKTGSGSSSAAAPQTGIVEQC_{[3]}C_{[4]}TSIC_{[5]}SLYQLENYC_{[6]}N;
IN-65
(SEQ ID NO: 149)
RPSGRKSSKMQAFRIWDVNQKTFYLRNNQLVAGYLQGPNVNLEEKIDVVPIEPHAL
FLGIHGGKMCLSCVKSGDETRLQLEAVCITDLSENRKQDKRFAFIRSDSGPTTSFESAASP
GWFLCTAMEADQPVSLTNMPDEGVMVTKEYFQEDEGGGGSGGGGSFVNQHLC_{[1]}GSHL
VEALYLVC_{[2]}GERGFFYTPKTGSGSSSAAAPQTGIVEQC_{[3]}C_{[4]}TSIC_{[5]}SLYQLENYC_{[6]}N;
IN-66
(SEQ ID NO: 150)
MRPSGRKSSKMQAFRIWDVNQKTFYLRNNQLVAGYLQGPNVNLEEKIDVVPIEPH
ALFLGIHGGKMCLSCVKSGDETRLQLEAVNITDLSENRKQDKRFAFIRSDSGPTTSFESAA
SPGWFLCTAMEADQPVSLTNMPDEGVMVTKFYFQEDEGGGGSCGGGGSGGGGSFVNQ
HLC_{[1]}GSHLVEALYLVC_{[2]}GERGFFYTPKTGSGSSSAAAPQTGIVEQC_{[3]}C_{[4]}TSIC_{[5]}SLYQLE
NYC_{[6]}N;
IN-67
(SEQ ID NO: 151)
FVNQHLC_{[1]}GSHLVEALYLVC_{[2]}GERGFFYTPKTGSGSSSAAAPQTGIVEQC_{[3]}C_{[4]}TSIC
_{[5]}SLYQLENYC_{[6]}NGGGGSGGGGSCGGGGSRPSGRKSSKMQAFRIWDVNQKTFYLRNNQ
LVAGYLQGPNVNLEEKIDVVPIEPHALFLGIHGGKMCLSCVKSGDETRLQLEAVNITDLS
ENRKQDKRFAFIRSDSGPTTSFESAASPGWFLCTAMEADQPVSLTNMPDEGVMVTKFYF
QEDE;

[0339] In the sequences of this section, [1] to [6] indicate the Nos. of the cysteines; 3 pairs of disulfide bonds are formed by six cysteines in the compound, in which the A chain and the B chain are connected by two pairs of interchain disulfide bonds, a pair of intrachain disulfide bond is present in the A chain, and the specific positions for the three pairs of the disulfide bonds are: C_{[1]} and C_{[4]} forming a disulfide bond, C_{[2]} and C_{[6]} forming a disulfide bond, and C_{[3]} and C_{[5]} forming a disulfide bond.

[0340] In one embodiment, the insulin receptor binding polypeptide, the interleukin-1 receptor antagonistic protein, and a biomacromolecule form a single chain compound, for which the structure is (from left to right corresponding to the amino acid sequence from N-terminus to C-terminus):

[0341] the insulin receptor binding polypeptide—linking group (or spacer group)-biomacromolecule-linking group (or spacer group)-interleukin-1 receptor antagonistic protein;

[0342] the insulin receptor binding polypeptide—linking group (or spacer group)-interleukin-1 receptor antagonistic protein-linking group (or spacer group)—the biomacromolecule;

[0343] the biomacromolecule-linking group (or spacer group)—the insulin receptor binding polypeptide—linking group (or spacer group)-interleukin-1 receptor antagonistic protein;

[0344] the biomacromolecule-linking group (or spacer group)—the interleukin-1 receptor antagonistic protein-linking group (or spacer group)—the insulin receptor binding polypeptide;

[0345] the interleukin-1 receptor antagonistic protein-linking group (or spacer group)-biomacromolecule-linking group (or spacer group)—the insulin receptor binding polypeptide; or

[0346] the interleukin-1 receptor antagonistic protein-linking group (or spacer group)—the insulin receptor binding polypeptide—linking group (or spacer group)—the biomacromolecule;

[0347] in which the biomacromolecule may be albumin, IgG Fc, etc.

[0348] In one embodiment, the sequence of the fusion protein comprising the human albumin is:

(SEQ ID NO: 404)
DAHKSEVAHRFKDLGEENFKALVLIAFAQYLQQCPFEDHVKLVNEVTEFAKTCVAD
ESAENCDKSLHTLFGDKLCTVATLRETYGEMADCCAKQEPERNECFLQHKDDNPNLPRL
VRPEVDVMCTAFHDNEETFLKKYLYEIARRHPYFYAPELLFFAKRYKAAFTECCQAADK
AACLLPKLDELRDEGKASSAKQRLKCASLQKFGERAFKAWAVARLSQRFPKAEFAEVSK
LVTDLTKVHTECCHGDLLECADDRADLAKYICENQDSISSKLKECCEKPLLEKSHCIAEV
ENDEMPADLPSLAADFVESKDVCKNYAEAKDVFLGMFLYEYARRHPDYSVVLLLRLAK
TYETTLEKCCAAADPHECYAKVFDEFKPLVEEPQNLIKQNCELFEQLGEYKFQNALLVR
YTKKVPQVSTPTLVEVSRNLGKVGSKCCKHPEAKRMPCAEDYLSVVLNQLCVLHEKTP
VSDRVTKCCTESLVNRRPCFSALEVDETYVPKEFNAETFTFHADICTLSEKERQIKKQTAL
VELVKHKPKATKEQLKAVMDDFAAFVEKCCKADDKETCFAEEGKKLVAASQAALGL-(G
GGGS)ₘ-FVNQHLC_{[1]}GSHLVEALYLVC_{[2]}GERGFFYTPKT-C_{L}-GIVEQC_{[3]}C_{[4]}TSIC_{[5]}
SLYQLENYC_{[6]}N-(GGGGS)ₙ-RPSGRKSSKMQAFRIWDVNQKTFYLRNNQLVAGYLQGPNVN
LEEKIDVVPIEPHALFLGIHGGKMX_{IL66}LSX_{IL69}VKSGDETRLQLEAVNITDLSENRKQDKRFA
FIRSDSGPTTSFESAAX_{IL116}PGWFLX_{IL122}TAMEADQPVSLTNMPDEGVMVTKEYFQEDE;
or
(SEQ ID NO: 499)
DAHKSEVAHRFKDLGEENFKALVLIAFAQYLQQCPFEDHVKLVNEVTEFAKTCVAD
ESAENCDKSLHTLFGDKLCTVATLRETYGEMADCCAKQEPERNECFLQHKDDNPNLPRL
VRPEVDVMCTAFHDNEETFLKKYLYEIARRHPYFYAPELLFFAKRYKAAFTECCQAADK
AACLLPKLDELRDEGKASSAKQRLKCASLQKFGERAFKAWAVARLSQRFPKAEFAEVSK
LVTDLTKVHTECCHGDLLECADDRADLAKYICENQDSISSKLKECCEKPLLEKSHCIAEV
ENDEMPADLPSLAADFVESKDVCKNYAEAKDVFLGMFLYEYARRHPDYSVVLLLRLAK
TYETTLEKCCAAADPHECYAKVFDEFKPLVEEPQNLIKQNCELFEQLGEYKFQNALLVR
YTKKVPQVSTPTLVEVSRNLGKVGSKCCKHPEAKRMPCAEDYLSVVLNQLCVLHEKTP
VSDRVTKCCTESLVNRRPCFSALEVDETYVPKEFNAETFTFHADICTLSEKERQIKKQTAL
VELVKHKPKATKEQLKAVMDDFAAFVEKCCKADDKETCFAEEGKKLVAASQAALGL-(G
GGGS)ₘ-RPSGRKSSKMQAFRIWDVNQKTFYLRNNQLVAGYLQGPNVNLEEKIDVVPIEP
HALFLGIHGGKMX_{IL66}LSX_{IL69}VKSGDETRLQLEAVNITDLSENRKQDKRFAFIRSDSGPTT
SFESAAX_{IL116}PGWFLX_{IL122}TAMEADQPVSLTNMPDEGVMVTKFYFQEDE-(GGGGS)ₙ-FV
NQHLC_{[1]}GSHLVEALYLVC_{[2]}GERGFFYTPKT-C_{L}-GIVEQC_{[3]}C_{[4]}TSIC_{[5]}SLYQLENYC_{[6]}N;
or
(SEQ ID NO: 405)
FVNQHL_{[1]}GSHLVEALYLVC_{[2]}GERGFFYTPKT-C_{L}-GIVEQC_{[3]}C_{[4]}TSIC_{[5]}SLYQLENY
C_{[6]}N-(GGGGS)ₘ-DAHKSEVAHRFKDLGEENFKALVLIAFAQYLQQCPFEDHVKLVNEVTE
FAKTCVADESAENCDKSLHTLFGDKLCTVATLRETYGEMADCCAKQEPERNECFLQHK
DDNPNLPRLVRPEVDVMCTAFHDNEETFLKKYLYEIARRHPYFYAPELLFFAKRYKAAFT
ECCQAADKAACLLPKLDELRDEGKASSAKQRLKCASLQKFGERAFKAWAVARLSQRFP
KAEFAEVSKLVTDLTKVHTECCHGDLLECADDRADLAKYICENQDSISSKLKECCEKPLL
EKSHCIAEVENDEMPADLPSLAADFVESKDVCKNYAEAKDVFLGMFLYEYARRHPDYS
VVLLLRLAKTYETTLEKCCAAADPHECYAKVFDEFKPLVEEPQNLIKQNCELFEQLGEY
KFQNALLVRYTKKVPQVSTPTLVEVSRNLGKVGSKCCKHPEAKRMPCAEDYLSVVLNQ
LCVLHEKTPVSDRVTKCCTESLVNRRPCFSALEVDETYVPKEFNAETFTFHADICTLSEK
ERQIKKQTALVELVKHKPKATKEQLKAVMDDFAAFVEKCCKADDKETCFAEEGKKLVA
ASQAALGL-(GGGGS)ₙ-RPSGRKSSKMQAFRIWDVNQKTFYLRNNQLVAGYLQGPNVNL
EEKIDVVPIEPHALFLGIHGGKMX_{IL66}LSX_{IL69}VKSGDETRLQLEAVNITDLSENRKQDKRF
AFIRSDSGPTTSPESAAX_{IL116}PGWFLX_{IL122}TAMEADQPVSLTNMPDEGVMVTKFYFQEDE;
or
(SEQ ID NO: 406)
FVNQHLC_{[1]}GSHLVEALYLVC_{[2]}GERGFFYTPKT-C_{L}-GIVEQC_{[3]}C_{[4]}TSIC_{[5]}SLYQLENY
C_{[6]}N-(GGGGS)ₘ-RPSGRKSSKMQAFRIWDVNQKTFYLRNNQLVAGYLQGPNVNLEEKID
VVPIEPHALFLGIHGGKMX_{IL66}LSX_{IL69}VKSGDETRLQLEAVNITDLSENRKQDKRFAFIRS
DSGPTTSFESAAX_{IL116}PGWFLX_{IL122}TAMEADQPVSLTNMPDEGVMVTKFYFQEDE-(GGG
GS)ₙ-DAHKSEVAHRFKDLGEENFKALVLIAFAQYLQQCPFEDHVKLVNEVTEFAKTCVAD
ESAENCDKSLHTLFGDKLCTVATLRETYGEMADCCAKQEPERNECFLQHKDDNPNLPRL
VRPEVDVMCTAFHDNEETFLKKYLYEIARRHPYFYAPELLFFAKRYKAAFTECCQAADK
AACLLPKLDELRDEGKASSAKQRLKCASLQKFGERAFKAWAVARLSQRFPKAEFAEVSK
LVTDLTKVHTECCHGDLLECADDRADLAKYICENQDSISSKLKECCEKPLLEKSHCIAEV
ENDEMPADLPSLAADFVESKDVCKNYAEAKDVFLGMFLYEYARRHPDYSVVLLLRLAK
TYETTLEKCCAAADPHECYAKVFDEFKPLVEEPQNLIKQNCELFEQLGEYKFQNALLVR
YTKKVPQVSTPTLVEVSRNLGKVGSKCCKHPEAKRMPCAEDYLSVVLNQLCVLHEKTP
VSDRVTKCCTESLVNRRPCFSALEVDETYVPKEFNAETFTFHADICTLSEKERQIKKQTAL
VELVKHKPKATKEQLKAVMDDFAAFVEKCCKADDKETCFAEEGKKLVAASQAALGL;
or
(SEQ ID NO: 407)
FVNQHLC_{[1]}GSHLVEALYLVC_{[2]}GERGFFYTPKTGSGSSSAAAPQTGIVEQC_{[3]}C_{[4]}TSIC
_{[5]}SLYQLENYC_{[6]}NGGGGSGGGGSRPSGRKSSKMQAFRIWDVNQKTFYLRNNQLVAGYL
QGPNVNLEEKIDVVPIEPHALFLGIHGGKMX_{IL66}LSX_{IL69}VKSGDETRLQLEAVNITDLSEN
RKQDKRFAFIRSDSGPTTSFESAAX_{IL116}PGWFLX_{IL122}TAMEADQPVSLTNMPDEGVMVTK
FYFQEDEGGGGSGGGGSDAHKSEVAHRFKDLGEENFKALVLIAFAQYLQQCPFEDHVKL
VNEVTEFAKTCVADESAENCDKSLHTLFGDKLCTVATLRETYGEMADCCAKQEPERNEC
FLQHKDDNPNLPRLVRPEVDVMCTAFHDNEETFLKKYLYEIARRHPYFYAPELLFFAKRY
KAAFTECCQAADKAACLLPKLDELRDEGKASSAKQRLKCASLQKFGERAFKAWAVARL
SQRFPKAEFAEVSKLVTDLTKVHTECCHGDLLECADDRADLAKYICENQDSISSKLKECC
EKPLLEKSHCIAEVENDEMPADLPSLAADFVESKDVCKNYAEAKDVFLGMFLYEYARRH
PDYSVVLLLRLAKTYETTLEKCCAAADPHECYAKVFDEFKPLVEEPQNLIKQNCELFEQL
GEYKFQNALLVRYTKKVPQVSTPTLVEVSRNLGKVGSKCCKHPEAKRMPCAEDYLSVV
LNQLCVLHEKTPVSDRVTKCCTESLVNRRPCFSALEVDETYVPKEFNAETFTFHADICTL
SEKERQIKKQTALVELVKHKPKATKEQLKAVMDDFAAFVEKCCKADDKETCFAEEGKKL
VAASQAALGL;
or
(SEQ ID NO: 408)
X_{IL0}RPSGRKSSKNIQAFRIWDVNQKTFYLRNNQLVAGYLQGPNVNLEEKIDVVPIEP
HALFLGIHGGKMX_{IL66}LSX_{IL69}VKSGDETRLQLEAVNITDLSENRKQDKRFAFIRSDSGPTT
SFESAAX_{IL116}PGWFLX_{IL122}TAMEADQPVSLTNMPDEGVMVTKFYFQEDE-(GGGGS)ₘ-DA
HKSEVAHRFKDLGEENFKALVLIAFAQYLQQCPFEDHVKLVNEVTEFAKTCVADESAEN
CDKSLHTLFGDKLCTVATLRETYGEMADCCAKQEPERNECFLQHKDDNPNLPRLVRPEV
DVMCTAFHDNEETFLKKYLYEIARRHPYFYAPELLFFAKRYKAAFTECCQAADKAACLL
PKLDELRDEGKASSAKQRLKCASLQKFGERAFKAWAVARLSQRFPKAEFAEVSKLVTDL
TKVHTECCHGDLLECADDRADLAKYICENQDSISSKLKECCEKPLLEKSHCIAEVENDE
MPADLPSLAADFVESKDVCKNYAEAKDVFLGMFLYEYARRHPDYSVVLLLRLAKTYET
TLEKCCAAADPHECYAKVFDEFKPLVEEPQNLIKQNCELFEQLGEYKFQNALLVRYTKK
VPQVSTPTLVEVSRNLGKVGSKCCKHPEAKRMPCAEDYLSVVLNQLCVLHEKTPVSDR
VTKCCTESLVNRRPCFSALEVDETYVPKEFNAETFTFHADICTLSEKERQIKKQTALVELV
KHKPKATKEQLKAVMDDFAAFVEKCCKADDKETCFAEEGKKLVAASQAALGL-(GGGG
S)ₙ-FVNQHLC_{[1]}GSHLVEALYLVC_{[2]}GERGFFYTPKT-C_{L}-GIVEQC_{[3]}C_{[4]}TSIC_{[5]}SLYQ
LENYC_{[6]}N;
or
(SEQ ID NO: 409)
X_{IL0}RPSGRKSSKNIQAFRIWDVNQKTFYLRNNQLVAGYLQGPNVNLEEKIDVVPIEP
HALFLGIHGGKMX_{IL66}LSX_{IL69}VKSGDETRLQLEAVNITDLSENRKQDKRFAFIRSDSGPTT
SFESAAX_{IL116}PGWFLX_{IL122}TAMEADQPVSLTNMPDEGVMVTKFYFQEDE-(GGGGS)ₘ-FV
NQHLC_{[1]}GSHLVEALYLVC_{[2]}GERGFFYTPKT-C_{L}-GIVEQC_{[3]}C_{[4]}TSIC_{[5]}SLYQLENY
C_{[6]}N-(GGGGS)ₙ-DAHKSEVAHRFKDLGEENFKALVLIAFAQYLQQCPPEDHVKLVNEVTEFA
KTCVADESAENCDKSLHTLFGDKLCTVATLRETYGEMADCCAKQEPERNECFLQHKDDNP
NLPRLVRPEVDVMCTAFHDNEETFLKKYLYEIARRHPYFYAPELLFFAKRYKAAFTECCQ
AADKAACLLPKLDELRDEGKASSAKQRLKCASLQKFGERAFKAWAVARLSQRFPKAEF
AEVSKLVTDLTKVHTECCHGDLLECADDRADLAKYICENQDSISSKLKECCEKPLLEKS
HCIAEVENDEMPADLPSLAADFVESKDVCKNYAEAKDVFLGMFLYEYARRHPDYSVVL
LLRLAKTYETTLEKCCAAADPHECYAKVFDEFKPLVEEPQNLIKQNCELFEQLGEYKFQ
NALLVRYTKKVPQVSTPTLVEVSRNLGKVGSKCCKHPEAKRMPCAEDYLSVVLNQLCV
LHEKTPVSDRVTKCCTESLVNRRPCFSALEVDETYVPKEFNAETFTFHADICTLSEKERQI
KKQTALVELVKHKPKATKEQLKAVMDDFAAFVEKCCKADDKETCFAEEGKKLVAASQA
ALGL;

[0349] in each of the above-mentioned fusion proteins, m and n are each 0, 1, 2, 3, 4, 5, or 6 and each of other variables is defined as herein;

IN-68:
(SEQ ID NO: 152)
DAHKSEVAHRFKDLGEENFKALVLIAFAQYLQQCPFEDHVKLVNEV
TEFAKTCVADESAENCDKSLHTLFGDKLCTVATLRETYGEMADCCA
KQEPERNECFLQHKDDNPNLPRLVRPEVDVMCTAFHDNEETFLKKY
LYEIARRHPYFYAPELLFFAKRYKAAFTECCQAADKAACLLPKLDE
LRDEGKASSAKQRLKCASLQKFGERAFKAWAVARLSQRFPKAEFAE
VSKLVTDLTKVHTECCHGDLLECADDRADLAKYICENQDSISSKLK
ECCEKPLLEKSHCIAEVENDEMPADLPSLAADFVESKDVCKNYAEA
KDVFLGMFLYEYARRHPDYSVVLLLRLAKTYETTLEKCCAAADPHE
CYAKVFDEFKPLVEEPQNLIKQNCELFEQLGEYKFQNALLVRYTKK
VVPQVSTPTLVEVSRNLGKVGSKCCKHPEAKRMPCAEDYLSVVLNQ
LCVLHEKTPSDRVTKCCTESLVNRRPCFSALEVDETYVPKEFNAET
FTFHADICTLSEKERQIKKQTALVELVKHKPKATKEQLKAVMDDFA
AFVEKCCKADDKETCFAEEGKKLVAASQAALGLGGGGSGGGGSFVN
QHLC_{[1]}GSHLVEALYLVC_{[2]}GERGFFYTPKTGSGSSSAAAPQTGIV
EQC_{[3]}C_{[4]}TSIC_{[5]}SLYQLENYC_{[6]}NGGGGSGGGGSRPSGRKSSKM
QAPRIWDVNQKTFYLRNNQLVAGYLQGPNVNLEEKIDVVPIEPHAL
FLGIHGGKMCLSCVKSGDETRLQLEAVNITDLSENRKQDKRFAFIR
SDSGPTTSFESAACPGWFLCTAMEADQPVSLTNMPDEGVMVTKFYF
QEDE;
IN-69:
(SEQ ID NO: 153)
DAHKSEVAHRFKDLGEENFKALVLIAFAQYLQQCPFEDHVKLVNEV
TEFAKTCVADESAENCDKSLHTLFGDKLCTVATLRETYGEMADCCA
KQEPERNECFLQHKDDNPNLPRLVRPEVDVMCTAFHDNEETFLKKY
LYEIARRHPYFYAPELLFFAKRYKAAFTECCQAADKAACLLPKLDE
LRDEGKASSAKQRLKCASLQKFGERAFKAWAVARLSQRFPKAEFAE
VSKLVTDLTKVHTECCHGDLLECADDRADLAKYICENQDSISSKLK
ECCEKPLLEKSHCIAEVENDEMPADLPSLAADFVESKDVCKNYAEA
KDVFLGMFLYEYARRHPDYSVVLLLRLAKTYETTLEKCCAAADPHE
CYAKVFDEFKPLVEEPQNLIKQNCELFEQLGEYKFQNALLVRYTKK
VPQVSTPTLVEVSRNLGKVGSKCCKHPEAKRMPCAEDYLSVVLNQL
CVLHEKTPVSDRVTKCCTESLVNRRPCFSALEVDETYVPKEFNAET
FTFHADICTLSEKERQIKKQTALVELVKHKPKATKEQLKAVMDDFA
AFVEKCCKADDKETCFAEEGKKLVAASQAALGLGGGGSGGGGSRPS
GRKSSKMQAFRIWDVNQKTFYLRNNQLVAGYLQGPNVNLEEKIDVV
PIEPHALFLGIHGGKMCLSCVKSGDETRLQLEAVNITDLSENRKQD
KRFAFIRSDSGPTTSFESAACPGWFLCTAMEADQPVSLTNMPDEGV
MVTKFYFQEDEGGGGSGGGGSFVNQHLC_{[1]}GSHLVEALYLVC_{[2]}G
ERGFFYTPKTGSGSSSAAAPQTGIVEQC_{[3]}C_{[4]}TSIC_{[5]}SLYQLEN
YC_{[6]}N;
IN-70:
(SEQ ID NO: 154)
MRPSGRKSSKMQAFRIWDVNQKTFYLRNNQLVAGYLQGPNVNLEEK
IDVVPIEPHALFLGIHGGKMCLSCVKSGDETRLQLEAVNITDLSEN
RKQDKRFAFIRSDSGPTTSFESAACPGWFLCTAMEADQPVSLTNMP
DEGVMVTKFYFQEDEGGGGSGGGGSDAHKSEVAHRFKDLGEENFKA
LVLIAFAQYLQQCPFEDHVKLVNEVTEFAKTCVADESAENCDKSLH
TLFGDKLCTVATLRETYGEMADCCAKQEPERNECFLQHKDDNPNLP
RLVRPEVDVMCTAFHDNEETFLKKYLYEIARRHPYFYAPELLFFAK
RYKAAFTECCQAADKAACLLPKLDELRDEGKASSAKQRLKCASLQK
FGERAFKAWAVARLSQRFPKAEFAEVSKLVTDLTKVHTECCHGDLL
ECADDRADLAKYICENQDSISSKLKECCEKPLLEKSHCIAEVENDE
MPADLPSLAADFVESKDVCKNYAEAKDVFLGMFLYEYARRHPDYSV
VLLLRLAKTYETTLEKCCAAADPHECYAKVFDEFKPLVEEPQNLIK
QNCELFEQLGEYKFQNALLVRYTKKVPQVSTPTLVEVSRNLGKVGS
KCCKHPEAKRMPCAEDYLSVVLNQLCVLHEKTPVSDRVTKCCTESL
VNRRPCFSALEVDETYVPKEFNAETFTFHADICTLSEKERQIKKQT
ALVELVKHKPKATKEQLKAVMDDFAAFVEKCCKADDKETCFAEEGK
KLVAASQAALGLGGGGSGGGGSFVNQHLC_{[1]}GSHLVEALYLVC_{[2]}G
ERGFFYTPKTGAGSSSAAAPQTGIVEQC_{[3]}C_{[4]}TSIC_{[5]}SLYQLEN
YC_{[6]}N.

[0350] (2) A dimeric protein/cross-linking protein of the interleukin-1 receptor antagonistic protein—the linking or spacer group—the insulin receptor binding polypeptide

[0351] If the insulin receptor binding polypeptide is linked to the linking group via a chemical reaction and further linked to the interleukin-1 receptor antagonistic protein, there is of regularity somewhat in selecting the reactive functional groups and reactive sites on the insulin receptor binding polypeptide.

[0352] The human natural insulin has just one lysine at B29. The single chain insulin receptor binding polypeptide is linked to the linking group through the N-terminal α-amino group, the ε-amino groups on the side chains of the intrachain or terminal lysines or the mercapto groups on the side chains of the intrachain or terminal cysteines. The double-chain insulin receptor binding polypeptide is linked to the linking group through the N-terminal α-amino group of the B chain, the ε-amino group on the side chain of the lysine or the mercapto group on the side chain of the cysteine at the N- or C-terminus of the B chain, or the amino group on the side chain of the lysine or the mercapto group on the side chain of the cysteine at the C-terminus of the A chain.

[0353] In one embodiment, the sequence of the fusion protein is

(SEQ ID NO: 410)
U_{L}-X_{IL0}RPSGRKSSKMQAFRIWDVNQKTFYLRNNQLVAGYLQGPN
VNLEEKIDVVPIEPHALFLGIHGGKMX_{IL66}LSX_{IL69}VKSGDETRL
QLEAVNITDLSENRKQDKRFAFIRSDSGPTTSFESAAC
(the linking group- the insulin receptor
binding polypeptide)
PGWFLX_{IL122}TAMEADQPVSLTNMPDEGVMVTKFYFQEDE;
or
(SEQ ID NO: 411)
U_{L}-X_{IL0}RPSGRKSSKMQAFRIWDVNQKTFYLRNNQLVAGYLQGPN
VNLEEKIDVVPIEPHALFLGIHGGKMX_{IL66}LSX_{IL69}VKSGDETRL
QLEAVC
(the linking group- the insulin receptor
binding polypeptide)
ITDLSENRKQDKRFAFIRSDSGPTTSFESAASPGWFLX_{IL122}TAM
EADQPVSLTNMPDEGVMVTKFYFQEDE;
or
(SEQ ID NO: 412)
(the insulin receptor binding polypeptide- the
linking group)
C_{IL0}-X_{IL0}RPSGRKSSKMQAFRIWDVNQKTFYLRNNQLVAGYLQGP
NVNLEEKIDVVPIEPHALFLGIHGGKMX_{IL66}LSX_{IL69}VKSGDETRL
QLEAVX_{IL84}ITDLSENRKQDKRFAFIRSDSGPTTSFESAAX_{IL116}PG
WFLX_{IL122}TAMEADQPVSLTNMPDEGVMVTKFYFQEDE,
or
(SEQ ID NO: 413)
UL-X_{IL0}RPSGRKSSKMQAFRIWDVNQKTFYLRNNQLVAGYLQGPN
VNLEEKIDVVPIEPHALFLGIHGGKMX_{IL66}LSX_{IL69}VKSGDETRLQ
LEAVX_{IL84}ITDLSENRKQDKRFAFIRSDSGPTTSFESAAX_{IL116}PG
WFLX_{IL122}TAMEADQPVSLTNMPDEGVMVTKFYFQEDEC_{IL153}
(the linking group- the insulin receptor
binding polypeptide),

[0354] In the individual fusion proteins, each of the variables is defined as herein.

[0355] In one embodiment, one terminus of the linking group, which is a N-hydroxyl succinimide (NHS ester), is reacted with the amino group on the side chain of a lysine in the insulin receptor binding polypeptide, while the other terminus thereof, which is a modifying group activated by maleimide or iodoethylamide, is reacted with the cysteine at position 0, 6, 8, 9, 84, 116, 141, or 153 in the interleukin-1 receptor antagonistic protein, thereby forming a covalent linkage. In one embodiment, one terminus of the linking group, which is a modifying group activated by maleimide or iodoethylamide, is reacted with the cysteine at position 0, 6, 8, 9, 84, 116, 141, or 153 in the interleukin-1 receptor antagonistic protein to form a covalent linkage, while the other terminus thereof, which is an aldehyde group, is reacted with the amino group at N-terminus of the insulin receptor binding polypeptide, thereby forming a covalent linkage via reductive amination. In one embodiment, one terminus of the linking group, which is a NHS ester, is reacted with the amino group on the side chain of a lysine in the insulin receptor binding polypeptide, while the other terminus thereof, which is an aldehyde group, is reacted with the amino group at N-terminus of theinterleukin-1 receptor binding polypeptide, thereby forming covalent linkages via reductive amination.

[0356] The insulin receptor binding polypeptide has the single- or double-chain structure set forth in the invention. In one embodiment, the insulin receptor binding polypeptide is the human natural insulin, the human natural insulin desB30T, lispro insulin, aspart insulin, glulisine insulin, etc. The α-amino group at the N-terminus of the B chain or the ε-amino group on the side chain of an intrachain lysine may be reacted with the NHS ester at one terminus of the linking group.

[0357] In one embodiment, the insulin receptor binding polypeptide is a modified conjugate, for example, glargine insulin, insulin detemir, etc.

[0358] The single chain insulin receptor binding polypeptide may have one of the following sequences:

(SEQ ID NO: 414)
U_{L}-X_{IN107}HLC_{[1]}GSX_{IN108}LVEALYLVC_{[2]}GEX_{IN109}GFX_{IN110}X_{IN111}X_{IN112}
X_{IN113}X_{IN114}X_{IN115}-C_{L}-GIVEQC_{[3]}C_{[4]}X_{IN127}SICSLYQLENYC_{[6]}X_{IN128}
X_{IN129};
or
(SEQ ID NO: 415)
U_{L}-X_{IN107}HLC_{[1]}GSHLVEALYLVC_{[2]}GERGFX_{IN110}X_{IN111}X_{IN112}X_{IN113}
X_{IN114}X_{IN115}-C_{L}-GIVEQC_{[3]}C_{[4]}TSICSLYQLENYC_{[6]}X_{IN128}X_{IN129};
or
(SEQ ID NO: 416)
U_{L}-FVNQHLC_{[1]}GSHLVEALYLVC_{[2]}GERGFFYTPX_{IN114}T-C_{L}-GIVE
QC_{[3]}C_{[4]}TSIC_{[5]}SLYQLENYC_{[6]}N;
or
(SEQ ID NO: 417)
U_{L}-FVNQHLC_{[1]}GSHLVEALYLVC_{[2]}GERGFFYTPX_{IN114}TGKGSSSAAA
PQTGIVEQC_{[3]}C_{[4]}TSIC_{[5]}SLYQLENYC_{[6]}N;
or
(SEQ ID NO: 418)
U_{L}-FVNQHLC_{[1]}GSHLVEALYLVC_{[2]}GERGFFYTPX_{IN114}TGSGKSSAAA
PQTGIVEQC_{[3]}C_{[4]}TSIC_{[5]}SLYQLENYC_{[6]}N;
or
(SEQ ID NO: 419)
U_{L}-FVNQHLC_{[1]}GSHLVEALYLVC_{[2]}GERGFFYTPX_{IN114}TGSGSKSAAA
PQTGIVEQC_{[3]}C_{[4]}TSIC_{[5]}SLYQLENYC_{[6]}N;
or
(SEQ ID NO: 420)
U_{L}-FVNQHLC_{[1]}GSHLVEALYLVC_{[2]}GERGFFYTPX_{IN114}TGSGSSKAAA
PQTGIVEQC_{[3]}C_{[4]}TSIC_{[5]}SLYQLENYC_{[6]}N;
or
(SEQ ID NO: 421)
U_{L}-FVNQHLC_{[1]}GSHLVEALYLVC_{[2]}GERGFFYTPX_{IN114}TGSGSSSKAA
PQTGIVEQC_{[3]}C_{[4]}TSIC_{[5]}SLYQLENYC_{[6]}N;
or
(SEQ ID NO: 422)
U_{L}-FVNQHLC_{[1]}GSHLVEALYLVC_{[2]}GERGFFYTPX_{IN114}TGSGSSSAKA
PQTGIVEQC_{[3]}C_{[4]}TSIC_{[5]}SLYQLENYC_{[6]}N;
or
(SEQ ID NO: 423)
U_{L}-FVNQHLC_{[1]}GSHLVEALYLVC_{[2]}GERGFFYTPX_{IN114}TGSGSSSAAK
PQTGIVEQC_{[3]}C_{[4]}TSIC_{[5]}SLYQLENYC_{[6]}N;
or
(SEQ ID NO: 424)
U_{L}-FVNQHLC_{[1]}GSHLVEALYLVC_{[2]}GERGFFYTPX_{IN114}TGSGSSSAAA
PQTGIVEQC_{[3]}C_{[4]}TSIC_{[5]}SLYQLENYC_{[6]}NK;
or
(SEQ ID NO: 425)
FVNQHLC_{[1]}GSHLVEALYLVC_{[2]}GERGFFYTPX_{IN114}TGSGSSSAAAPQ
TGIVEQC_{[3]}C_{[4]}TSIC_{[5]}SLYQLENYC_{[6]}N;
or
(SEQ ID NO: 426)
U_{L}-FVNQHLC_{[1]}GSHLVEALYLVC_{[2]}GERGFFGSGSSSAAKPQTGIVE
QC_{[3]}C_{[4]}TSIC_{[5]}SLYQLENYC_{[6]}N;
or
(SEQ ID NO: 427)
U_{L}-FVNQHLC_{[1]}GSHLVEALYLVC_{[2]}GERGFFGSGSSSAKAPQTGIVE
QC_{[3]}C_{[4]}TSIC_{[5]}SLYQLENYC_{[6]}N;
or
(SEQ ID NO: 428)
U_{L}-FVNQHLC_{[1]}GSHLVEALYLVC_{[2]}GERGFFGSGSSSKAAPQTGIVE
QC_{[3]}C_{[4]}TSIC_{[5]}SLYQLENYC_{[6]}N;
or
(SEQ ID NO: 429)
U_{L}-FVNQHLC_{[1]}GSHLVEALYLVC_{[2]}GERGFFGSGSSSAAAPQTGIVE
QC_{[3]}C_{[4]}TSIC_{[5]}SLYQLENYC_{[6]}NK;
or
(SEQ ID NO: 430)
FVNQHLC_{[1]}GSHLVEALYLVC_{[2]}GERGFFGSGSSSAAAPQTGIVE
QC_{[3]}C_{[4]}TSIC_{[5]}SLYQLENYC_{[6]}N;

[0359] The variables in the individual peptides are defined as herein;

[0360] The single chain insulin receptor binding polypeptide is linked to the linking group through the α-amino group at the N-terminus or the ε-amino group on the side chain of a lysine.

[0361] The interleukin-1 receptor antagonistic protein for forming a dimeric protein/cross-linking protein may be

(SEQ ID NO: 431)
U_{L}-RPSGRKSSKNIQAFRIWDVNQKTFYLRNNQLVAGYLQGPNVNL
EEKIDVVPIEPHALFLGIHGGKMX_{IL66}LSX_{IL69}VKSGDETRLQLEA
VX_{IL84}ITDLSENRKQDKRFAFIRSDSGPTTSFESAAX_{IL116}PGWFL
X_{IL122}TAMEADQPVSLTNMPDEGVMVTKFYFQEDE;
or
(SEQ ID NO: 432)
U_{L}-CRPSGRKSSKNIQAFRIWDVNQKTFYLRNNQLVAGYLQGPNV
NLEEKIDVVPIEPHALFLGIHGGKMX_{IL66}LSX_{IL69}VKSGDETRLQ
LEAVNITDLSENRKQDKRFAFIRSDSGPTTSFESAASPGWFL
X_{IL122}TAMEADQPVSLTNMPDEGVMVTKFYFQEDE;
or
(SEQ ID NO: 433)
U_{L}-RPSGRKSSKNIQAFRIWDVNQKTFYLRNNQLVAGYLQGPNVN
LEEKIDVVPIEPHALFLGIHGGKMX_{IL66}LSX_{IL69}VKSGDETRLQLE
AVNITDLSENRKQDKRFAFIRSDSGPTTSFESAASPGWELX_{IL122}
TAMEADQPVSLTNMPDEGVMVTKFYFQEDEC;

[0362] each of the variables in the individual proteins is defined as herein.

[0363] The insulin receptor binding polypeptide-a linking or spacer group—the interleukin-1 receptor antagonistic protein may be:

(SEQ ID NO: 434)
(the insulin receptor binding polypeptide-
the linking group)
RPSGRKSSKMQAFRIWDVNQKTFYLRNNQLVAGYLQGPNVNL
EEKIDVVPIEPHALFLGIHGGKMX_{IL66}LSX_{IL69}VKSGDETRLQ
LEAVNITDLSENRKQDKRFAFIRSDSGPTTSFESAAX_{IL116}PG
WFLX_{IL122}TAMEADQPVSLTNMPDEGVMVTKFYFQEDE;
or
(SEQ ID NO: 435)
(the insulin receptor binding polypeptide-
the linking group)
CRPSGRKSSKMQAFRIWDVNQKTFYLRNNQLVAGYLQGPNVN
LEEKIDVVPIEPHALFLGIHGGKMX_{IL66}LSX_{IL69}VKSGDETRL
QLEAVNITDLSENRKQDKRFAFIRSDSGPTTSPESAASPGWF
LX_{IL122}TAMEADQPVSLTNMPDEGVMVTKFYFQEDE;

each of the variables in the individual proteins is defined as herein.

[0364] The sequences of the dimeric protein/cross-linking protein of the insulin receptor binding polypeptide and the interleukin-1 receptor antagonistic protein are selected from:

IN-29:
(SEQ ID NO: 113)
FVNQHLC_{[1]}GSHLVEALYLVC_{[2]}GERGFFYTPRTGK
(N^{ε}-PEG12-maleimide-IL-1ra)
GSSSAAAPQTGIVEQC_{[3]}C_{[4]}TSIC_{[5]}SLYQLENYC_{[6]}N,

wherein the sequence of the IL-1ra is:

(SEQ ID NO: 194)
RPSGRKSSKMQAFRIWDVNQKTFYLRNNQLVAGYLQGPNVNLEEKIDVVP
IEPHALFLGIHGGKMCLSCVKSGDETRLQLEAVNITDLSENRKQDKRFAF
IRSDSGPTTSPESAACPGWFLCTAMEADQPVSLTNMPDEGVMVTKFYFQE
DE,

[0365] the N-hydroxylsuccinimide of the linking group, i.e. maleimide-PEG12-NHS, is reacted with the amino group on the side chain of a lysine in the insulin receptor binding polypeptide, and the maleimide is reacted with the mercapto group on the side chain of a cysteine at position 116 underlined in the IL-1ra.

IN-30:
(SEQ ID NO: 114)
FVNQHLC_{[1]}GSHLVEALYLVC_{[2]}GERGFEYTPRTGK
(N^{ε}-PEG12-maleimide-the interleukin-1 receptor
antagonistic protein)
GSSSAAAPQTGIVEQC_{[3]}C_{[4]}TSIC_{[5]}SLYQLENYC_{[6]}N;

[0366] in which the sequence of the interleukin-1 receptor antagonistic protein is as follows:

(SEQ ID NO: 195)
RPSGRKSSKMQAFRIWDVNQKTFYLRNNQLVAGYLQGPNVNLEEKIDVV
PIEPHALFLGIHGGKMCLSCVKSGDETRLQLEAVCITDLSENRKQDKRF
AFIRSDSGPTTSFESAASPGWFLCTAMEADQPVSLTNMPDEGVMVTKFY
FQEDE,

[0367] The N-hydroxylsuccinimide of the linking group, i.e. maleimide-PEG12-NHS, is reacted with the amino group on the side chain of a lysine in the insulin receptor binding polypeptide, and the maleimide is reacted with the mercapto group on the side chain of a cysteine at position 84 underlined in the interleukin-1 receptor antagonistic protein.

IN-31:
(SEQ ID NO: 115)
FVNQHLC_{[1]}GSHLVEALYLVC_{[2]}GERGFEYTPRTGK
(N^{ε}-PEG20K-maleimide-IL-1ra)
GSSSAAAPQTGIVEQC_{[3]}C_{[4]}TSIC_{[5]}SLYQLENYC_{[6]}N,

in which the sequence of IL-1ra is SEQ ID NO:194 and the N-hydroxylsuccinimide of the linking group, i.e. maleimide-PEG20K-NHS, is reacted with the amino group on the side chain of a lysine in the insulin receptor binding polypeptide, and the maleimide is reacted with the mercapto group on the side chain of a cysteine at position 116 underlined in the IL-1ra.

IN-32:
(SEQ ID NO: 116)
FVNQHLC_{[1]}GSHLVEALYLVC_{[2]}GERGFFYTPRTGK
(N^{ε}-PEG20K-maleimide-the interleukin-1
receptor antagonistic protein)
GSSSAAAPQTGIVEQC_{[3]}C_{[4]}TSIC_{[5]}SLYQLENYC_{[6]}N,

in which the sequence of the interleukin-1 receptor antagonistic protein is SEQ ID NO: 195, and the N-hydroxylsuccinimide of the linking group, i.e. maleimide-PEG20K-NHS, is reacted with the amino group on the side chain of a lysine in the insulin receptor binding polypeptide, and the maleimide is reacted with the mercapto group on the side chain of a cysteine at position 84 underlined in the interleukin-1 receptor antagonistic protein.

IN-33:
(SEQ ID NO: 117)
F[N^{α}-(N^{α}-(HOOC(CH₂)₁₄CO)-γ-L-Glu)]VNQHLC_{[1]}
GSHLVEALYLVC_{[2]}GERGFFYTPRTGK
(N^{ε}-PEG12-maleimide-IL-1ra)
GSSSAAAPQTGIVEQC_{[3]}C_{[4]}TSIC_{[5]}SLYQLENYC_{[6]}N;

in which the sequence of IL-1ra is SEQ ID NO:194 and the N-hydroxylsuccinimide of the linking group, i.e. maleimide-PEG12-NHS, is reacted with the amino group on the side chain of a lysine in the insulin receptor binding polypeptide, and the maleimide is reacted with the mercapto group on the side chain of a cysteine at position 116 underlined in the IL-1ra.

IN-34:
(SEQ ID NO: 118)
F[N^{α}-(N^{α}-(HOOC(CH₂)₁₆CO)-γ-L-Glu)]VNQHLC_{[1]}GS
HLVEALYLVC_{[2]}GERGFFYTPRTGK
(N^{ε}-PEG12-maleimide-the interleukin-1
receptor antagonistic protein)
GSSSAAAPQTGIVEQC_{[3]}C_{[4]}TSIC_{[5]}SLYQLENYC_{[6]}N,

[0368] F[N^{α}—(N^{α}—(HOOC(CH₂)₁₆CO)-γ-L-Glu)]VNQHLC_{[1]}GSHLVEALYLVC_{[2]}GERGFFYTPRT GK (N^{ε}-PEG12-maleimide—the interleukin-1 receptor antagonistic protein) GSSSAAAPQTGIVEQC_{[3]}C_{[4]}TSIC_{[5]}SLYQLENYC_{[6]}N(SEQ ID NO: 118), in which the sequence of the interleukin-1 receptor antagonistic protein is SEQ ID NO: 195, and the N-hydroxylsuccinimide of the linking group, i.e. maleimide-PEG12-NHS, is reacted with the amino group on the side chain of a lysine in the insulin receptor binding polypeptide, and the maleimide is reacted with the mercapto group on the side chain of a cysteine at position 84 underlined in the interleukin-1 receptor antagonistic protein.

IN-35:
(SEQ ID NO: 119)
RPSGRKSSKMQAFRIWDVNQKTFYLRNNQLVAGYLQGPNVNLEEKID
VVPIEPHALFLGIHGGKMCLSCVKSGDETRLQLEAVNITDLSENRKQ
DKRFAFIRSDSGPTTSFESAAC
(S-maleimide-PEG12-human insulin)
PGWFLCTAMEAD QPVSLTNMPDEGVMVTKFYFQEDE;
(S is the sulphur atom on the side chain of a
cysteine residue)

[0369] the N-hydroxylsuccinimide of the linking group, i.e. maleimide-PEG12-NHS, is reacted with α-amino group at the N-terminus of the B chain of the human insulin, and the maleimide is reacted with the mercapto group on the side chain of a cysteine at position 116 in the IL-1ra.

IN-36:
(SEQ ID NO: 120)
RPSGRKSSKMQAFRIWDVNQKTFYLRNNQLVAGYLQGPNVNLEEKID
VVPIEPHALFLGIHGGKMCLSCVKSGDETRLQLEAVNITDLSENRKQ
DKRFAFIRSDSGPTTSFESAAC
(S-maleimide-PEG12-the insulin receptor binding
polypeptide)
PGWFLCTAMEADQPVSLTNMPDEGVMV TKFYFQEDE,
(S is the sulphur atom on the side chain of a
cysteine residue)

[0370] the N-hydroxylsuccinimide of the linking group, i.e. maleimide-PEG12-NHS, is reacted with the α-amino group at the N-terminus of the insulin receptor binding polypeptide N^{εB29}—(N^{α}—(HOOC(CH₂)₁₄CO)-γ-Glu)des (B30)—the B chain of the human insulin, and the maleimide is reacted with the mercapto group on the side chain of a cysteine at position 116 in the IL-1ra.

IN-37:
(SEQ ID NO: 121)
RPSGRKSSKMQAFRIWDVNQKTFYLRNNQLVAGYLQGPNVNLEEKID
VVPIEPHALFLGIHGGKMCLSCVKSGDETRLQLEAVNITDLSENRKQ
DKRFAFIRSDSGPTTSFESAAC
(S-maleimide-PEG20K-human insulin)
PGWFLCTAMEADQPVSLTNMPDEGVMVTKFYFQEDE;
(S is the sulphur atom on the side chain of a
cysteine residue)

[0371] the N-hydroxylsuccinimide of the linking group, i.e. maleimide-PEG20K-NHS, is reacted with α-amino group at the N-terminus of the B chain of the human insulin, and the maleimide is reacted with the mercapto group on the side chain of a cysteine at position 116 in the IL-1ra.

IN-38:
(SEQ ID NO: 122)
RPSGRKSSKMQAFRIWDVNQKTFYLRNNQLVAGYLQGPNVNLEEKID
VVPIEPHALFLGIHGGKMCLSCVKSGDETRLQLEAVC
(S-maleimide-PEG 12-human insulin)
ITDLSENRK QDKRFAFIRSDSGPTTSFESAASPGWFLCTAMEADQP
VSLTNMPDEGVMVTKFYFQEDE;
(S is the sulphur atom on the side chain of a
cysteine residue)

[0372] in which the N-hydroxylsuccinimide of the linking group, i.e. maleimide-PEG12-NHS, is reacted with α-amino group at the N-terminus of the B chain of the human insulin, and the maleimide is reacted with the mercapto group on the side chain of a cysteine at position 84 in the interleukin-1 receptor antagonistic protein.

IN-39:
(SEQ ID NO: 123)
RPSGRKSSKMQAFRIWDVNQKTFYLRNNQLVAGYLQGPNVNLEEKID
VVPIEPHALFLGIHGGKMCLSCVKSGDETRLQLEAVC
(S-maleimide-PEG 20K-human insulin)
ITDLSEN-RKQDKRFAFIRSDSGPTTSFESAASPGWFLCTAMEADQP
VSLTNMPDEGVMVTKFYFQEDE;
(S is the sulphur atom on the side chain of a
cysteine residue)

[0373] in which the N-hydroxylsuccinimide of the linking group, i.e. maleimide-PEG20K-NHS, is reacted with α-amino group at the N-terminus of the B chain of the human insulin, and the maleimide is reacted with the mercapto group on the side chain of a cysteine at position 84 in the interleukin-1 receptor antagonistic protein.

IN-40:
(SEQ ID NO: 124)
RPSGRKSSKMQAFRIWDVNQKTFYLRNNQLVAGYLQGPNVNLEEKID
VVPIEPHALFLGIHGGKMCLSCVKSGDETRLQLEAVC
(S-maleimide-PEG12-the insulin receptor binding
polypeptide)
ITDLSENRKQDKRFAFIRSDSGPTTSFESAASPGWF LCTAMEADQP
VSLTNMPDEGVMV TKFYFQEDE;
(S is the sulphur atom on the side chain of a
cysteine residue)

[0374] in which the N-hydroxylsuccinimide of the linking group, i.e. maleimide-PEG12-NHS, is reacted with the α-amino group at the N-terminus of the insulin receptor binding polypeptide N^{εB29}—(N^{α}—(HOOC(CH₂)₁₄CO)-γ-Glu)des (B30)—the B chain of the human insulin, and the maleimide is reacted with the mercapto group on the side chain of a cysteine at position 84 in the interleukin-1 receptor antagonistic protein.

IN-41:
(SEQ ID NO: 125)
RPSGRKSSKMQAFRIWDVNQKTFYLRNNQLVAGYLQGPNVNLEEKID
VVPIEPHALFLGIHGGKMCLSCVKSGDETRLQLEAVNITDLSENRKQ
DKRFAFIRSDSGPTTSFESAAC
(S-maleimide-PEG12-human insulin desB30T)
PGWFLCTAMEADQPVSLTNMPDEGV MVTKFYFQEDE;
(S is the sulphur atom on the side chain of a
cysteine residue)

[0375] in which the N-hydroxylsuccinimide of the linking group, i.e. maleimide-PEG12-NHS, is reacted with the ε-amino group of a lysine in the human insulin desB30T B29, and the maleimide is reacted with the mercapto group on the side chain of a cysteine at position 116 in the IL-1ra.

IN-42:
(SEQ ID NO: 126)
RPSGRKSSKMQAFRIWDVNQKTFYLRNNQLVAGYLQGPNVNLEEKID
VVPIEPHALFLGIHGGKMCLSCVKSGDETRLQLEAVNITDLSENRKQ
DKRFAFIRSDSGPTTSFESAAC
(S-maleimide-PEG20K-human insulin desB30T)
PGWFLCTAMEADQPVSLTNMPDEGVMVTKFYFQEDE;
(S is the sulphur atom on the side chain of a
cysteine residue)

[0376] in which the N-hydroxylsuccinimide of the linking group, i.e. maleimide-PEG12-NHS, is reacted with the g-amino group of a lysine in the human insulin desB30T B29, and the maleimide is reacted with the mercapto group on the side chain of a cysteine at position 116 in the IL-1ra.

IN-43:
(SEQ ID NO: 127)
RPSGRKSSKMQAFRIWDVNQKTFYLRNNQLVAGYLQGPNVNLEEKID
VVPIEPHALFLGIHGGKMCLSCVKSGDETRLQLEAVC
(S-maleimide-PEG 12-human insulin desB30T)
ITDLSENRKQDKRFAFIRSDSGPTTSFESAASPG WFLCTA MEADQ
PVSLTNMPDEGVMVTKFYFQEDE,
(S is the sulphur atom on the side chain of a
cysteine residue)

[0377] in which the N-hydroxylsuccinimide of the linking group, i.e. maleimide-PEG12-NHS, is reacted with the ε-amino group of a lysine in the human insulin desB30T B29, and the maleimide is reacted with the mercapto group on the side chain of a cysteine at position 84 in the interleukin-1 receptor antagonistic protein.

IN-44:
(SEQ ID NO: 128)
RPSGRKSSKMQAFRIWDVNQKTFYLRNNQLVAGYLQGPNVNLEEKID
VVPIEPHALFLGIHGGKMCLSCVKSGDETRLQLEAVC
(S-maleimide-PEG 20K-human insulin desB30T)
ITDLSENRKQDKRFAFIRSDSGPTTSFESAASPG WFLCTAMEADQP
VSLTNMPDEGVMVTKFYFQEDE,
(S is the sulphur atom on the side chain of a
cysteine residue)

[0378] in which the N-hydroxylsuccinimide of the linking group, i.e. maleimide-PEG20K-NHS, is reacted with the ε-amino group of a lysine in the human insulin desB30T B29, and the maleimide is reacted with the mercapto group on the side chain of a cysteine at position 84 in the interleukin-1 receptor antagonistic protein.

IN-45:
(SEQ ID NO: 129)
FVNQHLC_{[1]}GSHLVEALYLVC_{[2]}GERGFFYTPRTGSGSSSAAAPQTG
IVEQC_{[3]}C_{[4]}TSIC_{[5]}SLYQLENYC_{[6]}NK,
(N^{ε}-PEG12-maleimide-IL-1ra)

wherein the sequence of the IL-1ra is SEQ ID NO:194;

[0379] in which the N-hydroxylsuccinimide of the linking group, i.e. maleimide-PEG12-NHS, is reacted with the ε-amino group on the side chain of a lysine at the C-terminus of the single chain insulin, and the maleimide is reacted with the mercapto group on the side chain of a cysteine at position 116 underlined in the IL-1ra.

IN-46:
(SEQ ID NO: 130)
FVNQHLC_{[1]}GSHLVEALYLVC_{[2]}GERGFFYTPRTGSGSSSAAAPQTG
IVEQC_{[3]}C_{[4]}TSIC_{[5]}SLYQLENYC_{[6]}NK,
(N^{ε}-PEG20K-maleimide-IL-1ra)

wherein the sequence of the IL-1ra is SEQ ID NO:194;

[0380] the N-hydroxylsuccinimide of the linking group, i.e. maleimide-PEG20K-NHS, is reacted with the ε-amino group on the side chain of a lysine at the C-terminus of the single chain insulin, and the maleimide is reacted with the mercapto group on the side chain of a cysteine at position 116 underlined in the IL-1ra.

IN-47:
(SEQ ID NO: 131)
FVNQHLC_{[1]}GSHLVEALYLVC_{[2]}GERGFFYTPRTGSGSSSAAA
PQTGIVEQC_{[3]}C_{[4]}TSIC_{[5]}SLYQLENYC_{[6]}NK
(N^{ε}-PEG12-maleimide-the interleukin-1 receptor
antagonistic protein),

the sequence of the interleukin-1 receptor antagonistic protein is SEQ ID NO:195;

[0381] in which the N-hydroxylsuccinimide of the linking group, i.e. maleimide-PEG12-NHS, is reacted with the ε-amino group on the side chain of a lysine at the C-terminus of the single chain insulin, and the maleimide is reacted with the mercapto group on the side chain of a cysteine at position 84 underlined in the interleukin-1 receptor antagonistic protein.

IN-48:
(SEQ ID NO: 132)
FVNQHLC_{[1]}GSHLVEALYLVC_{[2]}GERGFFYTPRTGSGSSSAAA
PQTGIVEQC_{[3]}C_{[4]}TSIC_{[5]}SLYQLENYC_{[6]}NK
(N^{ε}-PEG20K-maleimide-the interleukin-1 receptor
antagonistic protein),

the sequence of the interleukin-1 receptor antagonistic protein is SEQ ID NO: 195, and the N-hydroxylsuccinimide of the linking group, i.e. maleimide-PEG20K-NHS, is reacted with the ε-amino group on the side chain of a lysine at C-terminus of the single chain insulin, and the maleimide is reacted with the mercapto group on the side chain of a cysteine at position 84 underlined in the interleukin-1 receptor antagonistic protein.

IN-49:
(SEQ ID NO:133)
F(N^{α}-PEG12-maleimide-IL-1ra)VNQHLC_{[1]}GSHLVEA
LYLVC_{[2]}GERGFFYTPRTGSGSSSAAAPQTGIVEQC_{[3]}C_{[4]}TS
IC_{[5]}SLYQLENYC_{[6]}N,

wherein the sequence of the IL-1ra is

(SEQ ID NO: 196)
CRPSGRKSSKMQAFRIWDVNQKTFYLRNNQLVAGYLQGPNVNLEE
KIDVVPIEPHALFLGIHGGKMCLSCVKSGDETRLQLEAVNITDLS
ENRKQDKRFAFIRSDSGPTTSFESAASPGWFLCTAMEADQPVSLT
NMPDEGVMVTKFYFQEDE;

[0382] the N-hydroxylsuccinimide of the linking group, i.e. maleimide-PEG12-NHS, is reacted with α-amino group at the N-terminus of the single chain insulin, and the maleimide is reacted with the mercapto group on the side chain of a cysteine at the N-terminus of the interleukin-1 receptor antagonistic protein.

IN-50:
(SEQ ID NO: 134)
F(N^{α}-PEG20K-maleimide-IL-1ra)VNQHLC_{[1]}GSHLVEA
LYLVC_{[2]}GERGFFYTPRTGSGSSSAAAPQTGIVEQC_{[3]}C_{[4]}TSI
C_{[5]}SLYQLENYC_{[6]}N-,

wherein the sequence of the IL-1ra is SEQ ID NO:196;

[0383] the N-hydroxylsuccinimide of the linking group, i.e. maleimide-PEG20K-NHS, is reacted with the α-amino group at the N-terminus of the single chain insulin, and the maleimide is reacted with the mercapto group on the side chain of a cysteine at the N-terminus of the interleukin-1 receptor antagonistic protein.

IN-51:
(SEQ ID NO: 135)
FVNQHLC_{[1]}GSHLVEALYLVC_{[2]}GERGFFYTPRTGK(N^{ε}-PEG12-
maleimide-the interleukin-1 receptor antagonistic
protein)GSSSAAAPQTGIVEQC_{[3]}C_{[4]}TSIC_{[5]}SLYQLENYC_{[6]}N-,

in which the sequence of the interleukin-1 receptor antagonistic protein is SEQ ID NO: 196; the N-hydroxylsuccinimide of the linking group, i.e. maleimide-PEG12-NHS, is reacted with the ε-amino group on the side chain of a lysine in the single chain insulin, and the maleimide is reacted with the mercapto group on the side chain of a cysteine at the N-terminus of the interleukin-1 receptor antagonistic protein.

IN-52:
(SEQ ID NO: 136)
FVNQHLC_{[1]}GSHLVEALYLVC_{[2]}GERGFFYTPRTGK
(N^{ε}-PEG20K-maleimide-the interleukin-1 receptor
antagonistic protein)GSSSAAAPQTGIVEQC_{[3]}C_{[4]}
TSIC_{[5]}SLYQLEN-YC_{[6]}N;

[0384] in which the sequence of the interleukin-1 receptor antagonistic protein is SEQ ID NO: 196;

[0385] in which the N-hydroxylsuccinimide of the linking group, i.e. maleimide-PEG20K-NHS, is reacted with the ε-amino group on the side chain of a lysine in the single chain insulin, and the maleimide is reacted with the mercapto group on the side chain of a cysteine at the N-terminus of the interleukin-1 receptor antagonistic protein.

IN-53:
(SEQ ID NO: 137)
FVNQHLC_{[1]}GSHLVEALYLVC_{[2]}GERGFFYTPRTGSGSSSAK
(N^{ε}-PEG12-maleimide-the interleukin-1 receptor
antagonistic protein)APQTGIVEQC_{[3]}C_{[4]}TSIC_{[5]}
SLYQLENYC_{[6]}N,

in which the sequence of the interleukin-1 receptor antagonistic protein is SEQ ID NO: 196;

[0386] in which the N-hydroxylsuccinimide of the linking group, i.e. maleimide-PEG12-NHS, is reacted with the ε-amino group on the side chain of a lysine in the single chain insulin, and the maleimide is reacted with the mercapto group on the side chain of a cysteine at the N-terminus of the interleukin-1 receptor antagonistic protein.

IN-54:
(SEQ ID NO: 138)
FVNQHLC_{[1]}GSHLVEALYLVC_{[2]}GERGFFYTPRTGSGSSSAK
(N^{ε}-PEG20K-maleimide-the interleukin-1 receptor
antagonistic protein)APQTGIVEQC_{[3]}C_{[4]}TSIC_{[5]}
SLYQLENYC_{[6]}N,

in which the sequence of the interleukin-1 receptor antagonistic protein is SEQ ID NO: 196; in which the N-hydroxylsuccinimide of the linking group, i.e. maleimide-PEG20K-NHS, is reacted with the ε-amino group on the side chain of a lysine in the single chain insulin, and the maleimide is reacted with the mercapto group on the side chain of a cysteine at the N-terminus of the interleukin-1 receptor antagonistic protein.

IN-55:
(SEQ ID NO: 139)
FVNQHLC_{[1]}GSHLVEALYLVC_{[2]}GERGFFGSGSSSAK
(N^{ε}-PEG12-maleimide-IL-1ra)APQTGIVEQC_{[3]}
C_{[4]}TSIC_{[5]}SLYQLENYC_{[6]}N,

in which the sequence of the IL-1ra is SEQ ID NO:194,

[0387] the N-hydroxylsuccinimide of the linking group, i.e. maleimide-PEG12-NHS, is reacted with the amino group on the side chain of a lysine in the insulin receptor binding polypeptide, and the maleimide is reacted with the mercapto group on the side chain of a cysteine at position 116 underlined in the IL-1ra.

IN-56:
(SEQ ID NO: 140)
FVNQHLC_{[1]}GSHLVEALYLVC_{[2]}GERGFFGSGSSSAK
(N^{ε}-PEG12-maleimide-the interleukin-1 receptor
antagonistic protein)APQTGIVEQC_{[3]}C_{[4]}
TSIC_{[5]}SLYQLENYC_{[6]}N,

in which the sequence of the interleukin-1 receptor antagonistic protein is SEQ ID NO:195, and the N-hydroxylsuccinimide of the linking group, i.e. maleimide-PEG12-NHS, is reacted with the amino group on the side chain of a lysine in the insulin receptor binding polypeptide, and the maleimide is reacted with the mercapto group on the side chain of a cysteine at position 84 underlined in the interleukin-1 receptor antagonistic protein.

IN-57:
(SEQ ID NO: 141)
C(S-maleimide-PEG12-human insulin)RPSGRKSSKMQA
FRIWD VNQKTFYLRNNQLVA GYLQGPNVNLEEKIDVVPIEPHAL
FLGIHGGKMCLSCVKSGDETRLQLEAVNITDLSENRKQDKRFAFIR
SDSGPTTSFESAASPGWFLCTAMEADQPVSLTNMPDEGVMVTKFYF
QEDE
(S is the sulphur atom on the side chain of a
cysteine residue),

[0388] the N-hydroxylsuccinimide of the linking group, i.e. maleimide-PEG12-NHS, is reacted with α-amino group at the N-terminus of the B chain of the human insulin, and the maleimide is reacted with the mercapto group on the side chain of a cysteine at the N-terminus of the interleukin-1 receptor antagonistic protein.

IN-58:
(SEQ ID NO: 142)
C(S-maleimide-PEG12-the insulin receptor
binding polypeptide)RPSGRKSSKMQAFRIWDVNQKTFYLR
NNQLVAGYLQGPNVNLEEKIDVVPIEPHALFLGIHGGKMCLSCVKS
GDETRLQLEAVNITDLSENRKQDKRFAFIRSDSGPTTSFESAASPG
WFLCTAMEADQPVSLTNMPDEGVMVTKFYFQEDE,
(S is the sulphur atom on the side chain of a
cysteine residue)

[0389] the N-hydroxylsuccinimide of the linking group, i.e. maleimide-PEG12-NHS, is reacted with the α-amino group at the N-terminus of the insulin receptor binding polypeptide N^{εB29}—(N^{α}—(HOOC(CH₂)₁₄CO)-γ-Glu)des (B30)—the B chain of the human insulin, and the maleimide is reacted with the mercapto group on the side chain of a cysteine at the N-terminus of the interleukin-1 receptor antagonistic polypeptide.

IN-59:
(SEQ ID NO: 143)
C(S-maleimide-PEG12-human insulin desB30T)RPSG
RKSSKMQAPRIWDVNQKTFYLRNNQLVAGYLQGPNVNLEEKIDVVP
IEPHALFLGIHGGKMCLSCVKSGDETRLQLEAVNITDLSENRKQDK
RFAFIRSDSGPTTSEESAASPGWFLCTAMEADQPVSLTNMPDEGVM
VTKFYFQEDE,
(S is the sulphur atom on the side chain of a
cysteine residue)

[0390] the N-hydroxylsuccinimide of the linking group, i.e. maleimide-PEG12-NHS, is reacted with the ε-amino group on the side chain of a lysine in the human insulin desB30T B29, and the maleimide is reacted with the mercapto group on the side chain of a cysteine at the N-terminus of the interleukin-1 receptor antagonistic polypeptide.

IN-60:
(SEQ ID NO: 144)
MRPSGRKSSKMQAFRIWDVNQKTFYLRNNQLVAGYLQGPNVNLEEK
IDVVPIEPHALFLGIHGGKMCLSCVKSGDETRLQLEAVNITDLSEN
RKQDKRFAFIRSDSGPTTSFESAASPGWELCTAMEADQPVSLTNMP
DEGVMVTKEYFQEDEC(S-maleimide-PEG12-human insulin),
(S is the sulphur atom on the side chain of a
cysteine residue)

[0391] the N-hydroxylsuccinimide of the linking group, i.e. maleimide-PEG12-NHS, is reacted with α-amino group at the N-terminus of the B chain of the human insulin, and the maleimide is reacted with the mercapto group on the side chain of a cysteine at the C-terminus of the interleukin-1 receptor antagonistic protein.

IN-61:
(SEQ ID NO: 145)
MRPSGRKSSKMQAFRIWDVNQKTFYLRNNQLVAGYLQGPNVNLEEK
IDVVPIEPHALFLGIHGGKMCLSCVKSGDETRLQLEAVNITDLSEN
RKQDKRFAFIRSDSGPTTSFESAASPGWFLCTAMEADQPVSLTNMP
DEGVMVTKFYFQEDEC,
(S-maleimide-PEG12-human insulin desB30T)
(S is the sulphur atom on the side chain of a
cysteine residue)

[0392] the N-hydroxylsuccinimide of the linking group, i.e. maleimide-PEG12-NHS, is reacted with the ε-amino group on the side chain of a lysine in the human insulin desB30T B29, and the maleimide is reacted with the mercapto group on the side chain of a cysteine at the C-terminus of the interleukin-1 receptor antagonistic polypeptide.

[0393] In the sequences of this section, [1] to [6] indicate the Nos. of the cysteines; 3 pairs of disulfide bonds are formed by six cysteines in the compound, in which the A chain and the B chain are connected by two pairs of interchain disulfide bonds, a pair of intrachain disulfide bond is present in the A chain, and the specific positions for the three pairs of the disulfide bonds are: C_{[1]} and C_{[4]} forming a disulfide bond, C_{[2]} and C_{[6]} forming a disulfide bond, and C_{[3]} and C_{[5]} forming a disulfide bond.

[0394] The structure of the reagent of maleimide-PEG12-NHS is shown as follows:

[chemical structure]

[0395] The structure of the reagent after reacted with the interleukin-1 receptor antagonistic protein and the insulin receptor binding polypeptide is shown as follows:

[chemical structure]

[0396] 3. The Fusion Protein Consisting of the GIP Receptor Binding Polypeptide and the Interleukin-1 Receptor Antagonistic Protein

[0397] In one embodiment, the sequence of the GIP receptor binding polypeptide is

(SEQ ID NO: 439)
(X_{GI1}X_{GI2}X_{GI3}GT)ₜ₀X_{GI6}X_{GI7}SDX_{GI10}SX_{GI12}X_{GI13}X_{GI14}DX_{GI16}X_{GI17}
X_{GI18}QX_{GI20}X_{GI21}FX_{GI23}X_{GI24}WLX_{GI27}X_{GI28}X_{GI29}X_{GI30}X_{GI31}X_{GI32}
X_{GI33}X_{GI34}X_{GI35}X_{GI36}X_{GI37}X_{GI38}X_{GI39}X_{GI40}X_{GI41}X_{GI42}X_{GI43},

wherein,

[0398] X_{GI1} is a tyrosine, N-acetyl tyrosine, pyroglutamyl-tyrosine, glucitol-tyrosine, D-histidine, α, α-2 methylimidazolyl acetic acid (DMIA), N-methylhistidine, α-methylhistidine, imidazole acetic acid, deamino-histidine, hydroxylhistidine, acetylhistidine, homohistidine, N-palmitic acid-tyrosine, N-Fmoc-tyrosine, or absent; X_{G12} is an alanine, D-alanine, D-serine, serine, valine, glycine, N-methylserine, N-methylalanine, 2-methylalanine, or absent; X_{GI3} is a glutamic acid, hydroxyl proline, proline, or absent; X_{GI6} is a phenylalanine, or absent; X_{GI7} is an isoleucine, or threonine; X_{GI10} is a tyrosine, tryptophan, phenylalanine, valine, lysine, ornithine, glutamic acid, leucine, general formula 1, or general formula 2; X_{GI12} is an isoleucine, serine, lysine, arginine, general formula 1, or general formula 2; X_{GI13} is an alanine, glutamine, or tyrosine; X_{GI14} is a methionine or leucine; X_{GI16} is a lysine, arginine, serine, glutamic acid, glutamine, homoglutamic acid, homocysteine, threonine, glycine, 2-methylalanine, general formula 1, or general formula 2; X_{GI17} is an isoleucine, glutamine, glutamic acid, arginine, general formula 1, or general formula 2; X_{GI18} is a histidine, alanine, arginine, serine, threonine, or glycine; X_{GI20} is a glutamine, lysine, alanine, serine, threonine, citrulline, arginine, ornithine, 2-methylalanine, other α,α-disubstituted amino acids, general formula 1, or general formula 2; X_{GI21} is an aspartic acid, glutamic acid, homoglutamic acid, homocysteine, leucine, general formula 1, or general formula 2; X_{GI23} is a valine, or isoleucine; X_{GI24} is a glutamine, glutamic acid, asparagine, alanine, serine, threonine, 2-methylalanine, general formula 1, or general formula 2; X_{GI27} is a leucine, isoleucine, norleucine, lysine, valine, methionine, general formula 1, or general formula 2; X_{GI28} is a glycine, alanine, lysine, asparagine, general formula 1, or general formula 2; X_{GI29} is a glutamine, glycine, threonine, alanine, general formula 1, or general formula 2; X_{GI30} is a lysine, arginine, glycine, general formula 1, or general formula 2; X_{GI31} is a —NH₂, glycine, proline, or absent; X_{GI32} is a lysine, arginine, serine, general formula 1, general formula 2, or absent; X_{G33} is a lysine, arginine, serine, general formula 1, general formula 2, or absent; X_{GI34} is an asparagine, glycine, or absent; X_{GI35} is an asparagine, alanine, or absent; X_{GI36} is a tryptophan, proline, or absent; X_{GI37} is a lysine, arginine, proline, general formula 1, general formula 2, or absent; X_{GI38} is a histidine, proline, or absent; X_{GI39} is an asparagine, serine, or absent; X_{GI40} is an isoleucine, —NH₂, general formula 1, general formula 2, or absent; X_{GI41} is a threonine or absent; X_{GI42} is a glutamine or absent; X_{GI43} is a lysine, cysteine, PSSGAPPPS (SEQ ID NO:438), general formula 3, general formula 4, or absent; t0 is 0 or 1.

[0399] In one embodiment, the sequence from positions 31-42 in the GIP can be deleted by 1-12 of amino acid residues starting from the C-terminus. In one embodiment, the sequence from positions 31-42 in the GIP can be substituted with PSSGAPPPS (SEQ ID NO:438), GPSSGAPPPS (SEQ ID NO:437), X_{GI}PSSGAPPPS (SEQ ID NO:440), PSSGAPPPX_{GI}-NH₂ (SEQ ID NO:441), PSSGAPPPSX_{GI}-NH₂ (SEQ ID NO:442), in which X_{GI} is general formula 1 or general formula 2.

[0400] The GIP receptor binding polypeptide and the interleukin-1 receptor antagonistic protein are able to protect pancreas islet 3-cells by similar or distinct mechanisms, thereby treating diabetes mellitus. Accordingly, the fusion protein, dimeric protein or cross-linking protein formed by joining the two compounds may attain a therapeutic effect more excellent than that with either of the compounds alone, due to the synergistic effect by the two compounds. Furthermore, one of the tissues in which the GIP receptors are mainly distributed is the pancreatic islet. The GIP receptor binding polypeptide can serve as a target for the fusion protein, dimeric protein or cross-linking protein and enrich the interleukin-1 receptor antagonistic protein within and around the pancreatic islet, more effectively exerting actions such as anti-inflammation, etc.

[0401] The GIP receptor binding polypeptide is linked to the interleukin-1 receptor antagonistic protein in various linkages through an alternative linking group (or spacer group).

[0402] (1) The GIP receptor binding polypeptide—linking group or spacer group—the interleukin-1 receptor antagonistic protein

[0403] In one embodiment, the GIP receptor binding polypeptide and the interleukin-1 receptor antagonistic protein form a single chain compound via a linking group, for which the structure is (from left to right corresponding to the amino acid sequence from N-terminus to C-terminus):

[0404] GIP receptor binding polypeptide—linking group (or spacer group)-interleukin-1 receptor antagonistic protein; or

[0405] interleukin-1 receptor antagonistic protein-linking group (or spacer group)-GIP-1 receptor binding polypeptide.

[0406] In one embodiment, the sequence of the fusion protein is

(SEQ ID NO: 443)
U_{L}-(X_{GI1}X_{GI2}X_{GI3}GT)ₜ₀X_{GI6}X_{GI7}SDX_{GI10}SX_{GI12}X_{GI13}X_{GI14}DX_{GI16}X_{GI17}
X_{GI18}QX_{GI20}X_{GI21}FX_{GI23}X_{GI24}WLX_{GI27}X_{GI28}X_{GI29}X_{GI30}X_{GI31}X_{GI32}X_{GI33}
X_{GI34}X_{GI35}X_{GI36}X_{GI37}X_{GI38}X_{GI39}X_{GI40}X_{GI41}X_{GI42}X_{GI43}-Lⱼ-X_{IL0}RPSGRK
SSKNIQAFRIWDVNQKTFYLRNNQLVAGYLQGPNVNLEEKIDVVPIEP
HALFLGIHGGKNIX_{IL66}LSX_{IL69}VKSGDETRLQLEAVX_{IL84}ITDLSENR
KQDKRFAFIRSDSGPTTSFESAAX_{IL116}PGWFLX_{IL122}TAMEADQPVSLT
NMPDEGVMVTKFYFQEDE;
or
(SEQ ID NO: 444)
U_{L}-(X_{GI1}X_{GI2}X_{GI3}GT)ₜ₀X_{GI6}ISDX_{GI10}SX_{GI12}AMDX_{GI16}IHQQDFVNWL
X_{GI27}X_{GI28}QX_{GI30}(GX_{GI32}X_{GI33}NDWX_{GI37}HNITQ)ₜ₁(PSSGAPPPS)ₜ₂-
(GGGGS)ₘ-X_{L}-(GGGGS)ₙ-RPSGRKSSKMQAFRIWDVNQKTFYLRNN
QLVAGYLQGPNVNLEEKIDVVPIEPHALFLGIHGGKNICLSCVKSGDE
TRLQLEAVX_{IL84}ITDLSENRKQDKRFAFIRSDSGPTTSFESAAX_{IL116}P
GWFLCTAMEADQPVSLTNMPDEGVMVTKFYFQEDE;
or
(SEQ ID NO: 445)
U_{L}-X_{GI1}X_{GI2}X_{GI3}GTFISDYSIAMDKIHQQDFVNWLLAQK(GKKNDWKH
NITQ)ₜ₁(PSSGAPPPS)ₜ₂-(GGGGS)ₘ-X_{L}-(GGGGS)ₙ-RPSGRKSS
KNIQAFRIWDVNQKTFYLRNNQLVAGYLQGPNVNLEEKIDVVPIEPHA
LFLGIHGGKMCLSCVKSGDETRLQLEAVX_{IL84}ITDLSENRKQDKRFAF
IRSDSGPTTSFESAAX_{IL116}PGWFLCTAMEADQPVSLTNMPDEGVMVTK
FYFQEDE;
or
(SEQ ID NO: 446)
U_{L}-X_{GI6}ISDYSIAMDKIHQQDFVNWLLAQK(GKKNDWKHNITQ)ₜ₁(P
SSGAPPPS)ₜ₂-(GGGGS)ₘ-X_{L}-(GGGGS)ₙ-RPSGRKSSKMQAFRIW
DVNQKTFYLRNNQLVAGYLQGPNVNLEEKIDVVPIEPHALFLGIHGG
KNICLSCVKSGDETRLQLEAVX_{IL84}ITDLSENRKQDKRFAFIRSDSG
PTTSFESAAX_{IL116}PGWFLCTAMEADQPVSLTNMPDEGVMVTKFYFQE
DE,

[0407] in the above-mentioned sequences, m and n are each 0, 1, 2, 3, 4, 5, or 6; t0, t1, and t2 are each 0 or 1, and other variables are defined as herein.

[0408] In one embodiment, the GIP receptor binding polypeptide, the interleukin-1 receptor antagonistic protein, and a biomacromolecule form a single chain compound, for which the structure is (from left to right corresponding to the amino acid sequence from N-terminus to C-terminus):

[0409] GIP receptor binding polypeptide—linking group (or spacer group)-biomacromolecule-linking group (or spacer group)-interleukin-1 receptor antagonistic protein;

[0410] GIP receptor binding polypeptide—linking group (or spacer group)-interleukin-1 receptor antagonistic protein-linking group (or spacer group)-biomacromolecule; in which the biomacromolecule may be an albumin or IgG Fc, etc.

[0411] In one embodiment, the sequence of the fusion protein comprising the human albumin is:

(SEQ ID NO: 447)
(X_{GI1}X_{GI2}X_{GI3}GT)ₜ₀X_{GI6}ISDYSIAMDKIHQQDFVNWLLAQK(GKKN
DWKHNITQ)ₜ₁(PSSGAPPPS)ₜ₂-(GGGGS)ₘ-DAHKSEVAHRFKDL
GEENFKALVLIAFAQYLQQCPFEDHVKLVNEVTEFAKTCVADESAE
NCDKSLHTLFGDKLCTVATLRETYGEMADCCAKQEPERNECFLQHK
DDNPNLPRLVRPEVDVMCTAFHDNEETFLKKYLYEIARRHPYFYAP
ELLFFAKRYKAAFTECCQAADKAACLLPKLDELRDEGKASSAKQRL
KCASLQKFGERAFKAWAVARLSQRFPKAEFAEVSKLVTDLTKVHTE
CCHGDLLECADDRADLAKYICENQDSISSKLKECCEKPLLEKSHCI
AEVENDEMPADLPSLAADFVESKDVCKNYAEAKDVFLGMFLYEYAR
RHPDYSVVLLLRLAKTYETTLEKCCAAADPHECYAKVFDEFKPLVE
EPQNLIKQNCELFEQLGEYKFQNALLVRYTKKVPQVSTPTLVEVSR
NLGKVGSKCCKHPEAKRMPCAEDYLSVVLNQLCVLHEKTPVSDRVT
KCCTESLVNRRPCFSALEVDETYVPKEFNAETFTFHADICTLSEKE
RQIKKQTALVELVKHKPKATKEQLKAVMDDFAAFVEKCCKADDKET
CFAEEGKKLVAASQAALGL-(GGGGS)ₙ-RPSGRKSSKMQAFRIWD
VNQKTFYLRNNQLVAGYLQGPNVNLEEKIDVVPIEPHALFLGIHGG
KMCLSCVKSGDETRLQLEAVNITDLSENRKQDKRFAFIRSDSGPTT
SFESAACPGWFLCTAMEADQPVSLTNMPDEGVMVTKFYFQEDE,

in which m and n are each 0, 1, 2, 3, 4, 5, or 6 and other variables are defined as herein.

[0412] In one embodiment, the sequence of the fusion protein comprising the human albumin is:

(SEQ ID NO: 448)
(X_{GI1}X_{GI2}X_{GI3}GT)ₜ₀X_{GI6}ISDYSIAMDKIHQQDFVNWLLAQK(GKK
NDWKHNITQ)ₜ₁(PSSGAPPPS)ₜ₂-(GGGGS)ₘ-RPSGRKSSKMQA
FRIWDVNQKTFYLRNNQLVAGYLQGPNVNLEEKIDVVPIEPHALF
LGIHGGKMCLSCVKSGDETRLQLEAVNITDLSENRKQDKRFAFIR
SDSGPTTSFESAACPGWFLCTAMEADQPVSLTNMPDEGVMVTKFY
FQEDE-(GGGGS)ₙ-DAHKSEVAHRFKDLGEENFKALVLIAFAQYL
QQCPFEDHVKLVNEVTEFAKTCVADESAENCDKSLHTLFGDKLCT
VATLRETYGEMADCCAKQEPERNECFLQHKDDNPNLPRLVRPEVD
VMCTAFHDNEETFLKKYLYEIARRHPYFYAPELLFFAKRYKAAFT
ECCQAADKAACLLPKLDELRDEGKASSAKQRLKCASLQKFGERAF
KAWAVARLSQRFPKAEFAEVSKLVTDLTKVHTECCHGDLLECADD
RADLAKYICENQDSISSKLKECCEKPLLEKSHCIAEVENDEMPAD
LPSLAADFVESKDVCKNYAEAKDVFLGMFLYEYARRHPDYSVVLL
LRLAKTYETTLEKCCAAADPHECYAKVFDEFKPLVEEPQNLIKQN
CELFEQLGEYKFQNALLVRYTKKVPQVSTPTLVEVSRNLGKVGSK
CCKHPEAKRMPCAEDYLSVVLNQLCVLHEKTPVSDRVTKCCTESL
VNRRPCFSALEVDETYVPKEFNAETFTFHADICTLSEKERQIKKQ
TALVELVKHKPKATKEQLKAVMDDFAAFVEKCCKADDKETCFAEE
GKKLVAASQAALGL,

wherein m and n are each 0, 1, 2, 3, 4, 5, or 6 and other variables are defined as herein. In one embodiment, the sequence of the fusion protein comprising the human albumin is:

(SEQ ID NO: 449)
(X_{GI1}X_{GI2}X_{GI3}GT)ₜ₀X_{GI6}ISDYSIAMDKIHQQDFVNWLLAQK(GKK
NDWKHNITQ)ₜ₁(PSSGAPPPS)ₜ₂(X_{GI1}X_{GI2}X_{GI3}GT)ₜ₀X_{GI6}ISD
YSIAMDKIHQQDFVNWLLAQK(GKKNDWKHNITQ)ₜ₁(PSSGAPPP
S)ₜ₂-(GGGGS)ₘ-RPSGRKSSKMQAFRIWDVNQKTFYLRNNQLVAGYLQ
GPNVNLEEKIDVVPIEPHALFLGIHGGKMCLSCVKSGDETRLQLEAVNIT
DLSENRKQDKRFAFIRSDSGPTTSFESAACPGWFLCTAMEADQPVSLTNM
PDEGVMVTKFYFQEDE-(GGGGS)ₙ-DAHKSEVAHRFKDLGEENFKALVL
IAFAQYLQQCPFEDHVKLVNEVTEFAKTCVADESAENCDKSLHTLFGDKL
CTVATLRETYGEMADCCAKQEPERNECFLQHKDDNPNLPRLVRPEVDVMC
TAFHDNEETFLKKYLYEIARRHPYFYAPELLFFAKRYKAAFTECCQAADK
AACLLPKLDELRDEGKASSAKQRLKCASLQKFGERAFKAWAVARLSQRFP
KAEFAEVSKLVTDLTKVHTECCHGDLLECADDRADLAKYICENQDSISSK
LKECCEKPLLEKSHCIAEVENDEMPADLPSLAADFVESKDVCKNYAEAKD
VFLGMFLYEYARRHPDYSVVLLLRLAKTYETTLEKCCAAADPHECYAKVF
DEFKPLVEEPQNLIKQNCELFEQLGEYKFQNALLVRYTKKVPQVSTPTLV
EVSRNLGKVGSKCCKHPEAKRMPCAEDYLSVVLNQLCVLHEKTPVSDRVT
KCCTESLVNRRPCFSALEVDETYVPKEFNAETFTFHADICTLSEKERQIK
KQTALVELVKHKPKATKEQLKAVMDDFAAFVEKCCKADDKETCFAEEGKK
LVAASQAALGL;

[0413] In one embodiment, the sequence of the fusion protein comprising the human albumin is:

(SEQ ID NO: 450)
(X_{GI1}X_{GI2}X_{GI3}GT)ₜ₀X_{GI6}ISDYSIAMDKIHQQDFVNWLLAQK(GKK
NDWKHNITQ)ₜ₁(PSSGAPPPS)ₜ₂(X_{GI1}X_{GI2}X_{GI3}GT)ₜ₀X_{GI6}ISDY
SIAMDKIHQQDFVNWLLAQK(GKKNDWKHNITQ)ₜ₁(PSSGAPPP
S)ₜ₂-(GGGGS)ₘ-DAHKSEVAHRFKDLGEENFKALVLIAFAQYLQ
QCPFEDHVKLVNEVTEFAKTCVADESAENCDKSLHTLFGDKLCTV
ATLRETYGEMADCCAKQEPERNECFLQHKDDNPNLPRLVRPEVDV
MCTAFHDNEETFLKKYLYEIARRHPYFYAPELLFFAKRYKAAFTE
CCQAADKAACLLPKLDELRDEGKASSAKQRLKCASLQKFGERAFK
AWAVARLSQRFPKAEFAEVSKLVTDLTKVHTECCHGDLLECADDR
ADLAKYICENQDSISSKLKECCEKPLLEKSHCIAEVENDEMPADL
PSLAADFVESKDVCKNYAEAKDVFLGMFLYEYARRHPDYSVVLLL
RLAKTYETTLEKCCAAADPHECYAKVFDEFKPLVEEPQNLIKQNC
ELFEQLGEYKFQNALLVRYTKKVPQVSTPTLVEVSRNLGKVGSKC
CKHPEAKRMPCAEDYLSVVLNQLCVLHEKTPVSDRVTKCCTESLV
NRRPCFSALEVDETYVPKEFNAETFTFHADICTLSEKERQIKKQT
ALVELVKHKPKATKEQLKAVMDDFAAFVEKCCKADDKETCFAEEG
KKLVAASQAALGL-(GGGGS)ₙ-RPSGRKSSKMQAFRIWDVNQKT
FYLRNNQLVAGYLQGPNVNLEEKIDVVPIEPHALFLGIHGGKMCL
SCVKSGDETRLQLEAVNITDLSENRKQDKRFAFIRSDSGPTTSPE
SAACPGWFLCTAMEADQPVSLTNMPDEGVMVTKFYFQEDE;

wherein m and n are each 0, 1, 2, 3, 4, 5, or 6 and other variables are defined as herein.

[0414] In one embodiment, the sequence of the fusion protein comprising IgG1 Fc is:

(SEQ ID NO: 451)
(X_{GI1}X_{GI2}X_{GI3}GT)ₜ₀X_{GI6}ISDYSIAMDKIHQQDFVNWLLAQK(GKK
NDWKHNITQ)ₜ₁(PSSGAPPPS)ₜ₂-(GGGGS)ₘ-RPSGRKSSKMQA
FRIWDVNQKTFYLRNNQLVAGYLQGPNVNLEEKIDVVPIEPHALF
LGIHGGKMCLSCVKSGDETRLQLEAVNITDLSENRKQDKRFAFIR
SDSGPTTSFESAACPGWFLCTAMEADQPVSLTNMPDEGVMVTKFY
FQEDE-(GGGGS)ₙ-AEPKSCDKTHTCPPCPAPELLGGPSVFLFP
PKPKDTLMISRTPEVTCVVVDVSHEDPEVKFNWYVDGVEVHNAKT
KPREEQYNSTYRVVSVLTVLHQDWLNGKEYKCKVSNKALPAPIEK
TISKAKGQPREPQVYTLPPSREEMTKNQVSLTCLVKGFYPSDIAV
EWESNGQPENNYKTTPPVLDSDGSFFLYSKLTVDKSRWQQGNVFS
CSVMHEALHNHYTQKSLSLSPGK,

wherein m and n are each 0, 1, 2, 3, 4, 5, or 6 and other variables are defined as herein.

[0415] In one embodiment, the sequence of the fusion protein comprising IgG1 Fc is:

(SEQ ID NO: 452)
(X_{GI1}X_{GI2}X_{GI3}GT)ₜ₀X_{GI6}ISDYSIAMDKIHQQDFVNWLLAQK(GKK
NDWKHNITQ)ₜ₁(PSSGAPPPS)ₜ₂-(GGGGS)ₘ-AEPKSCDKTHTC
PPCPAPELLGGPSVFLFPPKPKDTLMISRTPEVTCVVVDVSHEDP
EVKFNWYVDGVEVHNAKTKPREEQYNSTYRVVSVLTVLHQDWLNG
KEYKCKVSNKALPAPIEKTISKAKGQPREPQVYTLPPSREEMTKN
QVSLTCLVKGFYPSDIAVEWESNGQPENNYKTTPPVLDSDGSFFL
YSKLTVDKSRWQQGNVFSCSVMHEALHNHYTQKSLSLSPGK-(GG
GGS)ₙ-RPSGRKSSKMQAFRIWDVNQKTFYLRNNQLVAGYLQGPN
VNLEEKIDVVPIEPHALFLGIHGGKMCLSCVKSGDETRLQLEAVN
ITDLSENRKQDKRFAFIRSDSGPTTSFESAACPGWFLCTAMEADQ
PVSLTNMPDEGVMVTKFYFQEDE;

wherein m and n are each 0, 1, 2, 3, 4, 5, or 6 and other variables are defined as herein.

[0416] All of the fusion proteins comprising IgG1 Fc are dimeric proteins connected by an interchain disulfide bond formed between the cysteines of the Fc portions of the two monomeric proteins.

[0417] In one embodiment, the sequence of the fusion protein comprising IgG4 Fc and the interleukin-1 receptor antagonistic protein is

(SEQ ID NO: 453)
(X_{GI1}X_{GI2}X_{GI3}GT)ₜ₀X_{GI6}ISDYSIAMDKIHQQDFVNWLLAQK(GKK
NDWKHNITQ)ₜ₁(PSSGAPPPS)ₜ₂-(GGGGS)ₘ-RPSGRKSSKMQA
FRIWDVNQKTFYLRNNQLVAGYLQGPNVNLEEKIDVVPIEPHALF
LGIHGGKMCLSCVKSGDETRLQLEAVNITDLSENRKQDKRFAFIR
SDSGPTTSFESAAX_{IL116}PGWFLCTAMEADQPVSLTNMPDEGVMVT
KFYFQEDE-(GGGGS)ₙ-AESKYGPPCPPCPAPEAAGGPSVFLFPP
KPKDTLMISRTPEVTCₐVVVDVSQEDPEVQFNWYVDGVEVHNAKTK
PREEQFNSTYRVVSVLTVLHQDWLNGKEYKCₐKVSNKGLPSSIEKT
ISKAKGQPREPQVYTLPPSQEEMTKNQVSLTC_{b}LVKGFYPSDIAVE
WESNGQPENNYKTTPPVLDSDGSFFLYSRLTVDKSRWQEGNVFSC_{b}
SVMHEALHNHYTQKSLSLSLG,

wherein m and n are each 0, 1, 2, 3, 4, 5, or 6 and other variables are defined as herein.

[0418] The dimeric protein is a homodimer consisting of two identical sequences mentioned above. Each cysteine C underlined and the cysteine at the corresponding position in the other monomer form an interchain disulfide bond; an intrachain disulfide bond is formed between the Cₐs in each monomer; and an intrachain disulfide bond is formed between the C_{b}s in each monomer.

[0419] In this section, the fusion protein comprising the GIP receptor binding polypeptide and the interleukin-1 receptor antagonistic protein is selected from

GI-1:
(SEQ ID NO: 155)
YSEGTFISDYSIAMDKIHQQDFVNWLLAQKGKKNDWKHNITQGGGGSRPSGRKSS
KMQAFRIWDVNQKTFYLRNNQLVAGYLQGPNVNLEEKIDVVPIEPHALFLGIHGGKMC
LSCVKSGDETRLQLEAVNITDLSENRKQDKRFAFIRSDSGPTTSFESAACPGWFLCTAME
ADQPVSLTNMPDEGVMVTKFYFQEDE;
GI-2:
(SEQ ID NO: 156)
Ac-YAEGTFISDYSIAMDKIHQQDFVNWLLAQKGKKNDWKHNITQRPSGRKSSKMQ
AFRIWDVNQKTFYLRNNQLVAGYLQGPNVNLEEKIDVVPIEPHALFLGIHGGKMCLSCV
KSGDETRLQLEAVNITDLSENRKQDKRFAFIRSDSGPTTSFESAACPGWFLCTAMEADQP
VSLTNMPDEGVMVTKFYFQEDE;
GI-3:
(SEQ ID NO: 157)
Ac-YAEGTFISDYSIAMDKIHQQDFVNWLLAQKGKKNDWKHNITQGGGGSRPSGRK
SSKMQAFRIWDVNQKTFYLRNNQLVAGYLQGPNVNLEEKIDVVPIEPHALFLGIHGGKM
CLSCVKSGDETRLQLEAVNITDLSENRKQDKRFAFIRSDSGPTTSPESAACPGWFLCTAM
EADQPVSLTNMPDEGVMVTKFYFQEDE;
GI-4:
(SEQ ID NO: 158)
Ac-YAEGTFISDYSIAMDKIHQQDFVNWLLAQKGKKNDWKHNITQGGGGSGGGGS
RPSGRKSSKMQAFRIWDVNQKTFYLRNNQLVAGYLQGPNVNLEEKIDVVPIEPHALFLGI
HGGKMCLSCVKSGDETRLQLEAVNITDLSENRKQDKRFAFIRSDSGPTTSFESAACPGWF
LCTAMEADQPVSLTNMPDEGVMVTKFYFQEDE;
GI-5:
(SEQ ID NO: 159)
Ac-YAEGTFISDYSIAMDKIHQQDFVNWLLAQKGKKNDWKHNITQGGGGSGGGGS
GGGGSRPSGRKSSKMQAFRIWDVNQKTFYLRNNQLVAGYLQGPNVNLEEKIDVVPIEPH
ALFLGIHGGKMCLSCVKSGDETRLQLEAVNITDLSENRKQDKRFAFIRSDSGPTTSFESAA
CPGWFLCTAMEADQPVSLTNMPDEGVMVTKFYFQEDE;
GI-6:
(SEQ ID NO: 160)
YAPGTFISDYSIAMDKIHQQDFVNWLLAQKGKKNDWKHNITQRPSGRKSSKMQAF
RIWDVNQKTFYLRNNQLVAGYLQGPNVNLEEKIDVVPIEPHALFLGIHGGKMCLSCVKS
GDETRLQLEAVNITDLSENRKQDKRFAFIRSDSGPTTSFESAACPGWFLCTAMEADQPVS
LTNMPDEGVMVTKFYFQEDE;
GI-7:
(SEQ ID NO: 161)
YAPGTFISDYSIAMDKIHQQDFVNWLLAQKGKKNDWKHNITQGGGGSRPSGRKSS
KMQAFRIWDVNQKTFYLRNNQLVAGYLQGPNVNLEEKIDVVPIEPHALFLGIHGGKMC
LSCVKSGDETRLQLEAVNITDLSENRKQDKRFAFIRSDSGPTTSFESAACPGWFLCTAME
ADQPVSLTNMPDEGVMVTKFYFQEDE;
GI-8:
(SEQ ID NO: 162)
YAPGTFISDYSIAMDKIHQQDFVNWLLAQKGKKNDWKHNITQGGGGSGGGGSRPS
GRKSSKMQAFRIWDVNQKTFYLRNNQLVAGYLQGPNVNLEEKIDVVPIEPHALFLGIHG
GKMCLSCVKSGDETRLQLEAVNITDLSENRKQDKRFAFIRSDSGPTTSFESAACPGWFLC
TAMEADQPVSLTNMPDEGVMVTKFYFQEDE;
GI-9:
(SEQ ID NO: 163)
YAPGTFISDYSIAMDKIHQQDFVNWLLAQKGKKNDWKHNITQGGGGSGGGGSGG
GGSRPSGRKSSKMQAFRIWDVNQKTFYLRNNQLVAGYLQGPNVNLEEKIDVVPIEPHAL
FLGIHGGKMCLSCVKSGDETRLQLEAVNITDLSENRKQDKRFAFIRSDSGPTTSPESAACP
GWFLCTAMEADQPVSLTNMPDEGVMVTKFYFQEDE;
GI-10:
(SEQ ID NO: 164)
ISDYSIAMDKIHQQDFVNWLLAQKPSSGAPPPSGGGGSGGGGSRPSGRKSSKMQAF
RIWDVNQKTFYLRNNQLVAGYLQGPNVNLEEKIDVVPIEPHALFLGIHGGKMCLSCVKS
GDETRLQLEAVNITDLSENRKQDKRFAFIRSDSGPTTSFESAACPGWFLCTAMEADQPVS
LTNMPDEGVMVTKFYFQEDE;
GI-11:
(SEQ ID NO: 165)
YGEGTFISDYSIAMDKIHQQDFVNWLLAQKPSSGAPPPSGGGGSGGGGSGGGGSRP
SGRKSSKMQAFRIWDVNQKTFYLRNNQLVAGYLQGPNVNLEEKIDVVPIEPHALFLGIH
GGKMCLSCVKSGDETRLQLEAVNITDLSENRKQDKRFAFIRSDSGPTTSFESAACPGWFL
CTAMEADQPVSLTNMPDEGVMVTKFYFQEDE;
GI-12:
(SEQ ID NO: 166)
YGEGTFISDYSIAMDKIHQQDFVNWLLAQKPSSGAPPPSGGGGSRPSGRKSSKMQA
FRIWDVNQKTFYLRNNQLVAGYLQGPNVNLEEKIDVVPIEPHALFLGIHGGKMCLSCVK
SGDETRLQLEAVNITDLSENRKQDKRFAFIRSDSGPTTSFESAACPGWFLCTAMEADQPV
SLTNMPDEGVMVTKFYFQEDE;
GI-13:
(SEQ ID NO: 167)
A-cYAEGTFISDYSIAMDKIHQQDFVNWLLAQKPSSGAPPPSGGGGSGGGGSGGGGS
RPSGRKSSKMQAFRIWDVNQKTFYLRNNQLVAGYLQGPNVNLEEKIDVVPIEPHALFLGI
HGGKMCLSCVKSGDETRLQLEAVNITDLSENRKQDKRFAFIRSDSGPTTSFESAACPGWF
LCTAMEADQPVSLTNMPDEGVMVTKFYFQEDE;
GI-14:
(SEQ ID NO: 168)
Ac-YAEGTFISDYSIAMDKIHQQDFVNWLLAQKPSSGAPPPSGGGGSGGGGSRPSGR
KSSKMQAFRIWDVNQKTFYLRNNQLVAGYLQGPNVNLEEKIDVVPIEPHALFLGIHGGK
MCLSCVKSGDETRLQLEAVNITDLSENRKQDKRFAFIRSDSGPTTSFESAACPGWFLCTA
MEADQPVSLTNMPDEGVMVTKFYFQEDE;
GI-15:
(SEQ ID NO: 169)
Ac-YAEGTFISDYSIAMDKIHQQDFVNWLLAQKPSSGAPPPSGGGGSRPSGRKSSKM
QAFRIWDVNQKTFYLRNNQLVAGYLQGPNVNLEEKIDVVPIEPHALFLGIHGGKMCLSC
VKSGDETRLQLEAVNITDLSENRKQDKRFAFIRSDSGPTTSFESAACPGWFLCTAMEADQ
PVSLTNMPDEGVMVTKFYFQEDE;
GI-16:
(SEQ ID NO: 170)
FISDYSIAMDKIHQQDFVNWLLAQKGGGGSGGGGSRPSGRKSSKMQAFRIWDVNQ
KTFYLRNNQLVAGYLQGPNVNLEEKIDVVPIEPHALFLGIHGGKMCLSCVKSGDETRLQ
LEAVNITDLSENRKQDKRFAFIRSDSGPTTSFESAACPGWFLCTAMEADQPVSLTNMPDE
GVMVTKFYFQEDE;
GI-17:
(SEQ ID NO: 171)
FISDYSIAMDKIHQQDFVNWLLAQKGGGGSRPSGRKSSKMQAFRIWDVNQKTFYL
RNNQLVAGYLQGPNVNLEEKIDVVPIEPHALFLGIHGGKMCLSCVKSGDETRLQLEAVNI
TDLSENRKQDKRFAFIRSDSGPTTSFESAACPGWFLCTAMEADQPVSLTNMPDEGVMVT
KFYFQEDE;
GI-18:
(SEQ ID NO: 172)
FISDYSIAMDKIHQQDFVNWLLAQKPSSGAPPPSGGGGSGGGGSRPSGRKSSKMQA
FRIWDVNQKTFYLRNNQLVAGYLQGPNVNLEEKIDVVPIEPHALFLGIHGGKMCLSCVK
SGDETRLQLEAVNITDLSENRKQDKRFAFIRSDSGPTTSFESAACPGWFLCTAMEADQPV
SLTNMPDEGVMVTKFYFQEDE;
GI-19:
(SEQ ID NO: 173)
YAPGTFISDYSIAMDKIHQQDFVNWLLAQKRPSGRKSSKMQAFRIWDVNQKTFYLR
NNQLVAGYLQGPNVNLEEKIDVVPIEPHALFLGIHGGKMCLSCVKSGDETRLQLEAVNIT
DLSENRKQDKRFAFIRSDSGPTTSFESAACPGWFLCTAMEADQPVSLTNMPDEGVMVTK
FYFQEDE;
GI-20:
(SEQ ID NO: 174)
YAPGTFISDYSIAMDKIHQQDFVNWLLAQKPSSGAPPPSGGGGSRPSGRKSSKMQA
FRIWDVNQKTFYLRNNQLVAGYLQGPNVNLEEKIDVVPIEPHALFLGIHGGKMCLSCVK
SGDETRLQLEAVNITDLSENRKQDKRFAFIRSDSGPTTSFESAACPGWFLCTAMEADQPV
SLTNMPDEGVMVTKFYFQEDE;
GI-21:
(SEQ ID NO: 175)
YAPGTFISDYSIAMDKIHQQDFVNWLLAQKPSSGAPPPSGGGGSGGGGSRPSGRKSS
KMQAFRIWDVNQKTFYLRNNQLVAGYLQGPNVNLEEKIDVVPIEPHALFLGIHGGKMC
LSCVKSGDETRLQLEAVNITDLSENRKQDKRFAFIRSDSGPTTSFESAACPGWFLCTAME
ADQPVSLTNMPDEGVMVTKFYFQEDE;
GI-22:
(SEQ ID NO: 176)
Ac-YAEGTFISDYSIAMDKIHQQDFVNWLLAQKGKKNDWKHNITQGGGGSRPSGRK
SSKMQAFRIWDVNQKTFYLRNNQLVAGYLQGPNVNLEEKIDVVPIEPHALFLGIHGGKM
CLSCVKSGDETRLQLEAVNITDLSENRKQDKRFAFIRSDSGPTTSFESAACPGWFLCTAM
EADQPVSLTNMPDEGVMVTKFYFQEDEGGGGSDAHKSEVAHRFKDLGEENFKALVLIA
FAQYLQQCPFEDHVKLVNEVTEFAKTCVADESAENCDKSLHTLFGDKLCTVATLRETYG
EMADCCAKQEPERNECFLQHKDDNPNLPRLVRPEVDVMCTAFHDNEETFLKKYLYEIA
RRHPYFYAPELLFFAKRYKAAFTECCQAADKAACLLPKLDELRDEGKASSAKQRLKCAS
LQKFGERAFKAWAVARLSQRFPKAEFAEVSKLVTDLTKVHTECCHGDLLECADDRADLA
KYICENQDSISSKLKECCEKPLLEKSHCIAEVENDEMPADLPSLAADFVESKDVCKNYAE
AKDVFLGMFLYEYARRHPDYSVVLLLRLAKTYETTLEKCCAAADPHECYAKVEDEFKPL
VEEPQNLIKQNCELFEQLGEYKFQNALLVRYTKKVPQVSTPTLVEVSRNLGKVGSKCCK
HPEAKRMPCAEDYLSVVLNQLCVLHEKTPVSDRVTKCCTESLVNRRPCFSALEVDETYV
PKEFNAETFTFHADICTLSEKERQIKKQTALVELVKHKPKATKEQLKAVMDDFAAFVEKC
CKADDKETCFAEEGKKLVAASQAALGL;
GI-23:
(SEQ ID NO: 177)
YAPGTFISDYSIAMDKIHQQDFVNWLLAQKGKKNDWKHNITQGGGGSRPSGRKSS
KMQAFRIWDVNQKTFYLRNNQLVAGYLQGPNVNLEEKIDVVPIEPHALFLGIHGGKMC
LSCVKSGDETRLQLEAVNITDLSENRKQDKRFAFIRSDSGPTTSFESAACPGWFLCTAME
ADQPVSLTNMPDEGVMVTKEYFQEDEGGGGSDAHKSEVAHRFKDLGEENFKALVLIAF
AQYLQQCPFEDHVKLVNEVTEFAKTCVADESAENCDKSLHTLFGDKLCTVATLRETYGE
MADCCAKQEPERNECFLQHKDDNPNLPRLVRPEVDVMCTAFHDNEETFLKKYLYEIAR
RHPYFYAPELLFFAKRYKAAFTECCQAADKAACLLPKLDELRDEGKASSAKQRLKCASL
QKFGERAFKAWAVARLSQRFPKAEFAEVSKLVTDLTKVHTECCHGDLLECADDRADLA
KYICENQDSISSKLKECCEKPLLEKSHCIAEVENDEMPADLPSLAADFVESKDVCKNYAE
AKDVFLGMFLYEYARRHPDYSVVLLLRLAKTYETTLEKCCAAADPHECYAKVEDEFKPL
VEEPQNLIKQNCELFEQLGEYKFQNALLVRYTKKVPQVSTPTLVEVSRNLGKVGSKCCK
HPEAKRMPCAEDYLSVVLNQLCVLHEKTPVSDRVTKCCTESLVNRRPCFSALEVDETYV
PKEFNAETFTFHADICTLSEKERQIKKQTALVELVKHKPKATKEQLKAVMDDFAAFVEKC
CKADDKETCFAEEGKKLVAASQAALGL;

[0420] (2) A dimeric protein/cross-linking protein of the interleukin-1 receptor antagonistic protein—the linking or spacer group—the GIP receptor binding polypeptide

[0421] In such compounds, the linking group (or the spacer group) is linked at a non-terminal position of the interleukin-1 receptor antagonistic protein and of the GIP receptor binding polypeptide.

[0422] In one embodiment, the sequence of the fusion protein is

(SEQ ID NO: 454)
U_{L}-X_{IL0}RPSGRKSSKMQAFRIWDVNQKTFYLRNNQLVAGYLQGPNV
NLEEKIDVVPIEPHALFLGIHGGKMCLSCVKSGDETRLQLEAVNI
TDLSENRKQDKRFAFIRSDSGPTTSFESAAC
(linking group- GLP receptor binding polypeptide)
PGWFLCTAMEADQPVSLTNMPDEGVMVTKFYFQEDE;

each of the variables is defined as herein.

[0423] In another embodiment, the sequence of the fusion protein is

(SEQ ID NO: 455)
U_{L}-X_{IL0}RPSGRKSSKMQAFRIWDVNQKTFYLRNNQLVAGYLQGPNV
NLEEKIDVVPIEPHALFLGIHGGKMCLSCVKSGDETRLQLEAVC
(linking group- GIP receptor binding polypeptide)
ITDLSENRKQDKRFAFIRSDSGPTTSFESAASPGWFLCTAMEADQP
VSLTNMPDEGVMVTKFYFQEDE;

each of the variables is defined as herein.

[0424] In one particular embodiment, the molecular structure of the linking group may be maleimide-PEG-maleimide or I—CH₂—CONH-PEG-NHCO—CH₂—I; in one particular embodiment, the molecular structure of the linking group may be maleimide-(CH₂)ₙ-maleimide or I—CH₂—CONH—(CH₂)ₙ-NHCO—CH₂—I, in which n may be an integer from 1 to 30; in one particular embodiment, the molecular structure of the linking group may be maleimide-PEG-NHS. The GIP receptor binding polypeptide may typically react with the linking group through the amino group on the side chain of a lysine or the mercapto group on the side chain of a cysteine.

[0425] In one embodiment, the sequence of the GIP receptor binding polypeptide may be

(SEQ ID NO: 456)
U_{L}-(X_{GI1}X_{GI2}X_{GI3}GT)ₜ₀X_{GI6}ISDX_{GI10}SX_{GI12}AMDX_{GI16}IHQQDFVNWL
X_{GI27}X_{GI28}QX_{GI30}(GX_{GI32}X_{GI33}NDWX_{GI37}HNITQ)ₜ₁(PSSGAPPPS)ₜ₂,

wherein each of the variables is defined as herein.

[0426] In one particular embodiment, the sequence of the GIP receptor binding polypeptide may be one of the following sequences:

(SEQ ID NO: 457)
X_{GI1}X_{GI2}X_{GI3}GTFISDYSIAMDKIHQQDFVNWLLAQKGKKNDWKHNI
TQC;
(SEQ ID NO: 458)
X_{GI1}X_{GI2}X_{GI3}GTFISDYSIAMDKIHQQDFVNWLLAQKGKKNDWCHNI
TQ;
(SEQ ID NO: 459)
X_{GI1}X_{GI2}X_{GI3}GTFISDYSIAMDKIHQQDFVNWLLAQKGKCNDWKHNI
TQ;
(SEQ ID NO: 460)
X_{GI1}X_{GI2}X_{GI3}GTFISDYSIAMDKIHQQDFVNWLLAQKGCKNDWKHNI
TQ;
(SEQ ID NO: 461)
X_{GI1}X_{GI2}X_{GI3}GTFISDYSIAMDKIHQQDFVNWLLAQCGKKNDWKHNI
TQ;
(SEQ ID NO: 462)
X_{GI1}X_{GI2}X_{GI3}GTFISDYSIAMDCIHQQDFVNWLLAQKGKKNDWKHNI
TQ;
(SEQ ID NO: 463)
X_{GI1}X_{GI2}X_{GI3}GTFISDYSCAMDKIHQQDFVNWLLAQKGKKNDWKHNI
TQ;
(SEQ ID NO: 464)
X_{GI1}X_{GI2}X_{GI3}GTFISDCSIAMDKIHQQDFVNWLLAQKGKKNDWKHNI
TQ;
(SEQ ID NO: 465)
X_{GI1}X_{GI2}X_{GI3}GTFISDYSIAMDKIHQQDFVNWLLAQKC;
(SEQ ID NO: 466)
X_{GI1}X_{GI2}X_{GI3}GTFISDYSIAMDCIHQQDFVNWLLAQK-NH₂;
(SEQ ID NO: 467)
X_{GI1}X_{GI2}X_{GI3}GTFISDYSIAMDKIHQQDFVNWLLAQKPSSGAPPPSC;
(SEQ ID NO: 468)
X_{GI1}X_{GI2}X_{GI3}GTFISDYSIAMDKIHQQDFVNWLLAQKPSSGAPPPC-
NH₂;
(SEQ ID NO: 469)
X_{GI1}X_{GI2}X_{GI3}GTFISDYSIAMDKIHQQDFVNWLLAQCPSSGAPPPS-
NH₂;
(SEQ ID NO: 470)
X_{GI1}X_{GI2}X_{GI3}GTFISDYSIAMDCIHQQDFVNWLLAQKPSSGAPPPS-
NH₂;
(SEQ ID NO: 471)
X_{GI1}X_{GI2}X_{GI3}GTFISDYSCAMDKIHQQDFVNWLLAQKPSSGAPPPS-
NH₂;
(SEQ ID NO: 472)
X_{GI1}X_{GI2}X_{GI3}GTFISDCSIAMDKIHQQDFVNWLLAQKPSSGAPPPS-
NH₂;
(SEQ ID NO: 473)
FISDYSIAMDKIHQQDFVNWLLAQKC;
(SEQ ID NO: 474)
FISDYSIAMDKIHQQDFVNWLLAQC-NH₂;
(SEQ ID NO: 475)
FISDYSIAMDCIHQQDFVNWLLAQK-NH₂;
(SEQ ID NO: 476)
ISDYSIAMDKIHQQDFVNWLLAQC-NH₂;
or
(SEQ ID NO: 477)
ISDYSIAMDCIHQQDFVNWLLAQK-NH₂;

[0427] each of the variables is defined as herein;

[0428] The GIP-1 receptor binding polypeptide is linked to the interleukin-1 receptor antagonistic protein by reacting the mercapto group on the side chain of a cysteine with the maleimide or iodoacetyl on the linking group.

[0429] In one particular embodiment, the sequence of the GIP receptor binding polypeptide is one of the following sequences:

(SEQ ID NO: 478)
X_{GI1}X_{GI2}X_{GI3}GTFISDYSIAMDRIHQQDFVNWLLAQRGRRNDWRHNI
TQK;
(SEQ ID NO: 479)
X_{GI1}X_{GI2}X_{GI3}GTFISDYSIAMDRIHQQDFVNWLLAQRGRRNDWKHNI
TQ;
(SEQ ID NO: 480)
X_{GI1}X_{GI2}X_{GI3}GTFISDYSIAMDRIHQQDFVNWLLAQRGRKNDWRHNI
TQ;
(SEQ ID NO: 481)
X_{GI1}X_{GI2}X_{GI3}GTFISDYSIAMDRIHQQDFVNWLLAQRGKRNDWRHNI
TQ;
(SEQ ID NO: 482)
X_{GI1}X_{GI2}X_{GI3}GTFISDYSIAMDRIHQQDFVNWLLAQKGRRNDWRHNI
TQ;
(SEQ ID NO: 483)
X_{GI1}X_{GI2}X_{GI3}GTFISDYSIAMDKIHQQDFVNWLLAQRGRRNDWRHNI
TQ;
(SEQ ID NO: 484)
X_{GI1}X_{GI2}X_{GI3}GTFISDYSKAMDRIHQQDFVNWLLAQRGRRNDWRHNI
TQ;
(SEQ ID NO: 485)
X_{GI1}X_{GI2}X_{GI3}GTFISDKSIAMDRIHQQDFVNWLLAQRGRRNDWRHNI
TQ;
(SEQ ID NO: 486)
X_{GI1}X_{GI2}X_{GI3}GTFISDYSIAMDRIHQQDFVNWLLAQRPSSGAPPPSK;
(SEQ ID NO: 487)
X_{GI1}X_{GI2}X_{GI3}GTFISDYSIAMDRIHQQDFVNWLLAQRPSSGAPPPK-
NH₂;
(SEQ ID NO: 488)
X_{GI1}X_{GI2}X_{GI3}GTFISDYSIAMDRIHQQDFVNWLLAQKPSSGAPPPS-
NH₂;
(SEQ ID NO: 489)
X_{GI1}X_{GI2}X_{GI3}GTFISDYSIAMDKIHQQDFVNWLLAQRPSSGAPPPS-
NH₂;
(SEQ ID NO: 490)
X_{GI1}X_{GI2}X_{GI3}GTFISDKSIAMDRIHQQDFVNWLLAQRPSSGAPPPS-
NH₂;
(SEQ ID NO: 491)
X_{GI1}X_{GI2}X_{GI3}GTFISDYSIAMDRIHQQDFVNWLLAQK-NH₂;
(SEQ ID NO: 492)
X_{GI1}X_{GI2}X_{GI3}GTFISDYSIAMDKIHQQDFVNWLLAQR-NH₂;
(SEQ ID NO: 493)
FISDYSIAMDRIHQQDFVNWLLAQK-NH₂;
(SEQ ID NO: 494)
FISDYSIAMDKIHQQDFVNWLLAQR-NH₂;
(SEQ ID NO: 495)
ISDYSIAMDRIHQQDFVNWLLAQK-NH₂;
or
(SEQ ID NO: 496)
ISDYSIAMDKIHQQDFVNWLLAQR-NH₂;

[0430] each of the variables is defined as herein;

[0431] The GIP receptor binding polypeptide is reacted with the N-hydroxyl succinimidyl ester of the linking group through the amino group on the side chain of a lysine in the polypeptide, thus linking to the interleukin-1 receptor antagonistic protein.

[0432] In one embodiment, the sequence of the fusion protein is

(SEQ ID NO: 497)
(GIP-1 receptor binding polypeptide-linking group)
C_{IL0}-X_{IL0}RPSGRKSSKMQAFRIWDVNQKTFYLRNNQL
VAGYLQGPNVNLEEKIDVVPIEPHALFLGIHGGKMCLSCVKSGD
ETRLQLEAVX_{IL84}ITDLSENRKQDKRFAFIRSDSGPTTSFESAA
X_{IL116}PGWFLCTAMEADQPVSLTNMPDEGVMVTKEYFQEDE,

[0433] In one embodiment, the linking group has an aldehyde group and is linked to the N-terminus of interleukin-1 receptor antagonistic protein through reductive amination; in another embodiment, C_{IL0} cysteine is linked to the linking group via the mercapto group on the side chain, and then is linked to the GLP receptor binding polypeptide.

[0434] In one embodiment, the sequence of the fusion protein is

(SEQ ID NO: 498)
U_{L}-X_{IL0}RPSGRKSSKMQAFRIWDVNQKTFYLRNNQLVAGYLQGP
NVNLEEKIDVVPIEPHALFLGIHGGKMCLSCVKSGDETRLQLEA
VX_{IL84}ITDLSENRKQDKRFAFIRSDSGPTTSFESAAX_{IL116}PGWF
LCTAMEADQPVSLTNMPDEGVMVTKFYFQEDEC_{IL153},
(linking group- GLP receptor binding
polypeptide)

each of the variables being defined as herein.

[0435] The GIP receptor binding polypeptide may typically react with the linking group through the amino or mercapto group on the side chain of an amino acid residue.

[0436] In one embodiment, the insulin receptor binding polypeptide is a modified conjugate.

[0437] The sequences of the dimeric protein/cross-linking protein of the GIP receptor binding polypeptide and the interleukin-1 receptor antagonistic protein are selected from:

GI-24:
(SEQ ID NO: 178)
MRPSGRKSSKMQAFRIWDVNQKTFYLRNNQLVAGYLQGPNVNLE
EKIDVVPIEPHALFLGIHGGKMCLSCVKSGDETRLQLEAVC
(S-maleimide-PEG11-maleimide-S-GIP receptor
binding polypeptide)
ITDLSENRKQDKRFAFIRSDSGPTTSFESAASPGWFLCTAMEAD
QPVSLTNMPDEGVMVTKFYFQEDE;
(S is the sulphur atom on the side chain of a
cysteine residue)

wherein the GIP receptor binding polypeptide has the following sequence:

(SEQ ID NO: 197)
Ac-YAEGTFISDYSIAMDKIHQQDFVNWLLAQKGKKNDWCHNITQ

and is linked to the interleukin-1 receptor binding protein by reacting the mercapto group on the side chain of a cysteine with the maleimide;

GI-25:
(SEQ ID NO: 179)
RPSGRKSSKMQAFRIWDVNQKTFYLRNNQLVAGYLQGPNVNLEEKIDVV
PIEPHALFLGIHGGKMCLSCVKSGDETRLQLEAVNITDLSENRKQDKRF
AFIRSDSGPTTSFESAAC(S-maleimide-PEG40K-maleimide-S-
GIP receptor binding polypeptide)PGWFLCTAMEADQPVSLT
NMPDEGVMVTKFYFQEDE(S is the sulphur atom on the
side chain of a cysteine residue);

wherein the GIP receptor binding polypeptide has the following sequence:

(SEQ ID NO: 198)
Ac-YAEGTFISDYSIAMDKIHQQDFVNWLLAQKGKKNDWKHNITQC

and is linked to the interleukin-1 receptor binding protein by reacting the mercapto group on the side chain of a C-terminal cysteine with the maleimide;

GI-26:
(SEQ ID NO: 180)
RPSGRKSSKMQAFRIWDVNQKTFYLRNNQLVAGYLQGPNVNLEEKIDVV
PIEPHALFLGIHGGKMCLSCVKSGDETRLQLEAVNITDLSENRKQDKRF
AFIRSDSGPTTSFESAAC(S-maleimide-PEG40K-maleimide-S-
GIP receptor binding polypeptide)PGWFLCTAMEADQPVSLT
NMPDEGVMVTKFYFQEDE(S is the sulphur atom on the
side chain of a cysteine residue);

wherein the GIP receptor binding polypeptide has the following sequence:

(SEQ ID NO: 199)
YAPGTFISDYSIAMDKIHQQDFVNWLLAQKGKKNDWKHNITQC

and is linked to the interleukin-1 receptor binding protein by reacting the mercapto group on the side chain of a C-terminal cysteine with the maleimide;

GI-27:
(SEQ ID NO: 181)
MRPSGRKSSKMQAFRIWDVNQKTFYLRNNQLVAGYLQGPNVNLEEKIDV
VPIEPHALFLGIHGGKMCLSCVKSGDETRLQLEAVNITDLSENRKQDKR
FAFIRSDSGPTTSFESAASPGWFLCTAMEADQPVSLTNMPDEGVMVTKF
YFQEDEC(S-maleimide-PEG11-maleimide-S-GIP
receptor binding polypeptide)(S is the sulphur
atom on the side chain of a cysteine residue);

wherein the sequence of the GIP receptor binding polypeptide is

(SEQ ID NO: 200)
YAibEGTFISDYSIAMDKIHQQDFVNWLLAQC-NH₂;

GI-28:
(SEQ ID NO: 182)
C(S-maleimide-PEG11-maleimide-S-GIP receptor
binding polypeptide)RPSGRKSSKMQAFRIWDVNQKTFYLRNNQ
LVAGYLQGPNVNLEEKIDVVPIEPHALFLGIHGGKMCLSCVKSGDETRL
QLEAVNITDLSENRKQDKRFAFIRSDSGPTTSFESAAC[S-CH₂-CONH-
(CH₂CH₂O)₄-(CH₂)₂-NH-(N^{α}-(HOOC(CH₂)₁₆CO)-γ-Glu)]PGWFL
CTAMEADQPVSLTNMPDEGVMVTKFYFQEDE(S is the sulphur
atom on the side chain of a cysteine residue);

wherein the GIP receptor binding polypeptide has the sequence of

(SEQ ID NO: 201)
YAibEGTFISDYSIAMDKIHQQDFVNWLLAQKPSSGAPPPSC

and is linked to the interleukin-1 receptor binding protein by reacting the mercapto group on the side chain of a C-terminal cysteine with the maleimide;

GI-29:
(SEQ ID NO: 183)
MRPSGRKSSKMQAFRIWDVNQKTFYLRNNQLVAGYLQGPNVNLEEKIDV
VPIEPHALFLGIHGGKMCLSCVKSGDETRLQLEAVC(S-maleimide-
PEG40K-maleimide-S-GIP receptor binding
polypeptide)ITDLSENRKQDKRFAFIRSDSGPTTSFESAASPGWFL
CTAMEADQPVSLTN-MPDEGVMVTKFYFQEDE(S is the sulphur
atom on the side chain of a cysteine residue);

wherein the GIP receptor binding polypeptide has the sequence of

(SEQ ID NO: 202)
Ac-YAEGTFISDYSIAMDKIHQQDFVNWLLAQKPSSGAPPPC-NH₂

and is linked to the interleukin-1 receptor binding protein by reacting the mercapto group on the side chain of a C-terminal cysteine with the maleimide;

GI-30:
(SEQ ID NO: 184)
RPSGRKSSKMQAFRIWDVNQKTFYLRNNQLVAGYLQGPNVNLEEKIDVV
PIEPHALFLGIHGGKMCLSCVKSGDETRLQLEAVNITDLSENRKQDKRF
AFIRSDSGPTTSFESAAC(S-maleimide-PEG11-maleimide-S-
GIP receptor binding polypeptide)PGWFLCTAMEADQPVSL
TNMPDEGVMVTKFYFQEDE(S is the sulphur atom on the
side chain of a cysteine residue)

wherein the GIP receptor binding polypeptide has the sequence of

(SEQ ID NO: 203)
FISDYSIAMDKIHQQDFVNWLLAQKC-NH₂

and is linked to the interleukin-1 receptor binding protein by reacting the mercapto group on the side chain of a C-terminal cysteine with the maleimide.

[0438] Pharmaceutical Compositions and the Use

[0439] In a further aspect of the invention, a pharmaceutical composition comprising a therapeutically effective amount of a fusion protein or a fusion protein conjugate according to the present invention and a pharmaceutically acceptable carrier or additive, optionally other anti diabetic compounds, is provided for the treatment of type 1 diabetes, type 2 diabetes and other states that cause hyperglycemia. A fusion protein according to the present invention can be used for the manufacture of a pharmaceutical composition for use in the treatment of type 1 diabetes, type 2 diabetes and other states that cause hyperglycemia.

[0440] Injectable compositions of the fusion protein of the present invention can be prepared using the conventional techniques of the pharmaceutical industry which involve dissolving and mixing the suitable ingredients to give the final desired product. Thus, according to one procedure, a fusion protein according to the present invention is dissolved in an amount of water, of which the volume is somewhat less than the final volume of the composition to be prepared. An isotonic agent, a preservative and a buffer are added as required and the pH value of the solution is adjusted, if necessary, using an acid, e.g. hydrochloric acid, or a base, e.g. sodium hydroxide. Finally, the volume of the solution is adjusted with water to give the desired concentration.

[0441] In a further embodiment of the present invention, the buffer is selected from the group consisting of sodium acetate, sodium carbonate, citrate, glycylglycine, histidine, glycine, lysine, arginine, sodium dihydrogen phosphate, disodium hydrogen phosphate, sodium phosphate, and tris(hydroxymethyl)-aminomethane, bicine, tricine, malic acid, succinate, maleic acid, fumaric acid, tartaric acid, aspartic acid or mixtures thereof. Each one of these specific buffers constitutes an alternative embodiment of the invention.

[0442] In a further embodiment of the present invention, the preservative may be selected from the group consisting of phenol, o-cresol, m-cresol, p-cresol, methyl p-hydroxybenzoate, ethyl p-hydroxybenzoate, propyl p-hydroxybenzoate, butyl p-hydroxybenzoate, 2-phenoxyethanol, benzyl alcohol, chlorobutanol, thiomersal, bronopol, benzoic acid, imidurea, chlorohexidine, sodium dehydroacetate, chlorocresol, benzethonium chloride, chlorphenesine or mixtures thereof. The preservative is present in a concentration from 0.1 mg/ml to 20 mg/ml, preferably from 0.1 mg/ml to 5 mg/ml. In a further embodiment of the invention, the preservative is present in a concentration from 5 mg/ml to 10 mg/ml. Each one of these specific preservatives constitutes an alternative embodiment of the invention. The use of a preservative in pharmaceutical compositions is well-known to the skilled person. For convenience, reference is made to Remington: The Science and Practice of Pharmacy, 19^{th} edition, 1995.

[0443] In a further embodiment of the present invention, the formulation further comprises an isotonic agent which may be selected from the group consisting of a salt (e.g. sodium chloride), a sugar or sugar alcohol, an amino acid, an alditol (e.g. glycerol, 1,2-propanediol, 1,3-propanediol, 1,3-butanediol), polyethyleneglycol (e.g. PEG400), or mixtures thereof. Any sugar such as mono-, di-, or polysaccharides, or water-soluble glucans, including for example fructose, glucose, mannose, sorbose, xylose, maltose, lactose, sucrose, trehalose, dextran, pullulan, dextrin, cyclodextrin, soluble starch, hydroxyethyl starch and carboxymethylcellulose-Na may be used.

[0444] In one embodiment, the sugar additive is sucrose. Sugar alcohol is defined as a C4-C8 hydrocarbon having at least one —OH group and includes, for example, mannitol, sorbitol, inositol, galactitol, dulcitol, xylitol, and arabitol. In one embodiment, the sugar alcohol additive is mannitol. The sugars or sugar alcohols mentioned above may be used individually or in combination. There is no fixed limit to the amount used, as long as the sugar or sugar alcohol is soluble in the liquid preparation and does not adversely effect the stabilizing effects achieved using the methods of the invention. In one embodiment, the sugar or sugar alcohol concentration is between 1 mg/ml and 150 mg/ml. In a further embodiment of the invention, the isotonic agent is present in a concentration from 1 mg/ml to 50 mg/ml. In a further embodiment of the invention, the isotonic agent is present in a concentration from 1 mg/ml to 7 mg/ml. In a further embodiment of the invention, the isotonic agent is present in a concentration from 8 mg/ml to 24 mg/ml. In a further embodiment of the invention, the isotonic agent is present in a concentration from 25 mg/ml to 50 mg/ml. Each one of these specific isotonic agents constitutes an alternative embodiment of the invention. The use of an isotonic agent in pharmaceutical compositions is well-known to the skilled person. For convenience, reference is made to Remington: The Science and Practice of Pharmacy, 19^{th} edition, 1995.

[0445] Typical isotonic agents are sodium chloride, mannitol, dimethyl sulfoxide and glycerol, and typical preservatives are phenol, m-cresol, methyl p-hydroxybenzoate and benzyl alcohol. Examples of surfactants are sodium acetate, glycylglycine, HEPES (4-(2-hydroxyethyl)-1-piperazineethanesulfonic acid) and sodium phosphate.

### EXAMPLES

### Protective Groups

[0446] Acm acetamidomethy; Alloc or AOC allyloxycarbonyl; Bom, benzyloxymethyl; Br—Z, 2-bromobenzyloxycarbonyl; tBu, t-butyl; Bz, benzoyl; Bzl, benzyl; Boc:Butyloxy carbonyl; CHO formyl; cHx, cyclohexyl; Cbz or Z benzyloxycarbonyl; Cl—Z, 2-chlorobenzyloxycarbonyl; Fm, 9-fluorenylmethyl; Fmoc, 9-fluorenylmethoxycarbonyl; Mtt, 4-methyltrityl; Npys, 3-nitro-2-pyridinesulfenyl; Pmc, (2,2,5,7,8-pentamethylchroman-6-sulphonyl Tos, 4-toluenesulphonyl; Trt, triphenylmethyl; Xan, xanthyl.

[0447] Reagents and Solvents

[0448] ACN, acetonitrile; BOP, benzotriazol-1-yloxytris(dimethylamino) phosphonium hexafluorophosphate; DCC, N,N′-Dicyclohexylcarbodiimide; DCM, dichloromethane; DEPBT, 3-(Diethoxyphosphoryloxy)-1,2,3-benzotriazin-4 (3H)-one; DIC, N,N′-Diisopropylcarbodiimide; DIPEA (or DIEA), diisopropylethylamine; DMAP, 4-N,N-dimethylaminopyridine; DMF, dimethylformamide; DMSO, dimethyl sulfoxide; DTT, dithiothreitol; EDC or EDCI, 1-ethyl-3-(3-dimethylaminopropyl)carbodiimide. HCl; EtOAc, ethyl acetate; HBTU, O-(1H-benzotriazole-1-yl)-N,N,N′,N-tetramethyluronium hexafluorophosphate; HOBT, 1-hydroxybenzotriazole; Cl-HOBT 6-chloro-1-hydroxybenzotriazole; NMM, N-Methylmorpholine; NMP, N-methylpyrrolidinone; Piperidine, Su, succinimide; TEA, triethylamine; TFA, trifluoroacetic acid; TFE 2,2,2-Trifluoroethanol; THF, tetrahydrofuran; TIS, triisopropylsilane.

[0449] Reagents used in the present invention are purchasable from an ordinary shop for chemical reagents or bio-reagent/preparations or reagents conventionally formulated in the field, unless otherwise specified. All of the experiments and the steps thereof can be performed by the person skilled in the art according to the disclosure in the present invention and the conventional techniques in the field.

### Interleukin-1 Receptor Antagonistic Protein Open Reading Frame Sequence:

(SEQ ID NO: 500)
ATGGAAATCTGCAGAGGCCTCCGCAGTCACCTAATCACTCTCCTCCTCT
TCCTGTTCCATTCAGAGACGATCTGCCGACCCTCTGGGAGAAAATCCAG
CAAGATGCAAGCCTTCAGAATCTGGGATGTTAACCAGAAGACCTTCTAT
CTGAGGAACAACCAACTAGTTGCTGGATACTTGCAAGGACCAAATGTCA
ATTTAGAAGAAAAGATAGATGTGGTACCCATTGAGCCTCATGCTCTGTT
CTTGGGAATCCATGGAGGGAAGATGTGCCTGTCCTGTGTCAAGTCTGGT
GATGAGACCAGACTCCAGCTGGAGGCAGTTAACATCACTGACCTGAGCG
AGAACAGAAAGCAGGACAAGCGCTTCGCCTTCATCCGCTCAGACAGTGG
CCCCACCACCAGTTTTGAGTCTGCCGCCTGCCCCGGTTGGTTCCTCTGC
ACAGCGATGGAAGCTGACCAGCCCGTCAGCCTCACCAATATGCCTGACG
AAGGCGTCATGGTCACCAAATTCTACTTCCAGGAGGACGAGTAG.

### IL-1ra Amino Acid Sequence:

(SEQ ID NO: 501)
MEICRGLRSHLITLLLFLFHSETICRPSGRKSSKMQAFRIWDVNQKTFYL
RNNQLVAGYLQGPNVNLEEKIDVVPIEPHALFLGIHGGKMCLSCVKSGDE
TRLQLEAVNITDLSENRKQDKRFAFIRSDSGPTTSFESAACPGWFLCTAM
EADQPVSLTNMPDEGVMVTKFYFQEDE*.

1. Cloning of cDNA of Interleukin-1 Receptor Antagonistic Protein and Construction of Expression Vector

### 1.1 Designing the Primers Containing Restriction Enzyme Digestion Sites for Insertion of PCR Amplification Product of DNA

[0452] The cDNA sequence of IL-1Ra was obtained from human hepatic tissue using RT-PCR technology. Firstly, we need to check the sequence of cDNA to be amplified to identify that these enzyme digestion sites are not in the cDNA, and design the appropriate primers to allow specific amplification of the 5′ end of the cDNA. The cDNA sequence encoding complete or mature IL-1Ra was firstly amplified, and then ligated to pSUMO vector after digestion by restriction enzyme. Many pSUMO vectors are commercially available, such as the products of Lifesensors, Invitrogen, can be used for the proteins in the present invention.

### Primer Design

Forward primer 1:
(SEQ ID NO: 502)
(5′ GGCGGTCTCTAGGT-ATGGAAATCTGCAGA-3′)

for cloning the complete sequence of IL-1ra

Forward primer2:
(SEQ ID NO: 503)
(5′ GGCGGTCTCTAGGT-CGACCCTCTGGGAGA-3′)

for cloning the mature peptide sequence of IL-1ra
In this sequence, GGTCTC is the recognition sequence of restriction enzyme Bsal.

Reverse Primer
(SEQ ID NO: 504)
5′-GGCGGATCCTTA CTACTCGTCCTCCTG-3′

In this sequence, GGATCC is the recognition sequence of restriction enzyme BamHI.

### 1.2 Reverse Transcription-Polymerase Chain Reaction (RT-PCR)

[0454] Firstly, human IL-1Ra cDNA was obtained by reverse transcription-polymerase chain reaction techniques.
reverse transcription:

| | |
|---|---|
| hepatic tissue RNA(1 μg/μl) | 2 μl |
| oligonucleotide primer | 1 μl |
| water | 2 μl |
| | 5 μl |

Mixed, and denatured at 70° C. for 5 minutes, and then placed on ice for 5 minutes.

[0455] 10× reverse transcription buffer 2 μl

| | |
|---|---|
| MgCl₂(25 mM) | 4.4 μl |
| dNTPs(10 mM) | 1 μl |
| water | 6.1 μl |
| RNase inhibitor | 0.5 μl |
| Reverse transcriptase | 1 μl |
| | 15 μl |

The above two solutions were mixed, and placed in the PCR machine for reverse transcription reaction (25° C. 5 minutes, 42° C. 1 hour, 70° C. 15 minutes) PCR reaction system:

| | |
|---|---|
| 10X buffer | 2.5 μl |
| cDNA Template | 0.5 μl |
| Forward primer 2 (25 μM) | 2 μl |
| Reverse primer (25 μM) | 2 μl |
| Taq DNA polymerase | 1 μl |
| dNTPs(10 mM) | 0.5 μl |
| Nuclease free water | 16.5 μl |
| | 25 μl |

### PCR Reaction Program:

| Step1 94° C. | 5 min | | |
|---|---|---|---|
| Step2 94° C. | 30 sec | | |
| Step3 54° C. | 30 sec | {close oversize brace} | 30 cycles |
| Step4 72° C. | 1 min | | |

| | |
|---|---|
| Step5 72° C. | 5 min |

### 1.3 Purification of PCR Product

[0457] Qiagen DNA gel extraction kit was used to extract DNA from agarose gels
1. Electrophorese the PCR product through the 1% agarose gel. Locate the PCR product band which is expected to be 0.5 kb in the gel using a long wavelength UV lamp.
2. Excise the gel slice containing the PCR product with clean a blade.
3. Weight the gel slice in a tube. Add 3 volume of buffer QX1 to 1 volume of gel slice.
4. Add 20 μl of QIAEX II to the sample.
5. Incubate at 50° C. for 10 min to solubilize the gel and bind DNA.
6. Centrifuge the sample for 30 sec and carefully remove the supernatant.
7. Wash the precipitate with the buffer QX1.
8. Wash the precipitate twice with the buffer PE.
9. Air-dry the precipitate for 15 min.
10. Add 20 μl of H₂O and elute the DNA by vortex. Place at room temperature for 5 min.
11. Centrifuge for 30 sec. Carefully transfer the supernatant into a clean tube. (The supernatant contains the purified DNA).

### 1.4 Restriction Enzyme Digestion:

[0458] Bsal and BamHI was used as restriction enzymes.
10× digestion buffer 2.5 μl
Bsal (10 unit/μl) 1.5 μl
Purified PCR product 21 μl
[0459] 25μl
   Digested at 50° C. for 1 hour. Add 0.5 μl 10× digestion buffer (NEB2), 1.5 μl BamHI (10 unit/μl), and 10×BSA (NEB) 3 μl and then digested at 37° C. for another 1 hour.

### 1.5 Purification of Digested DNA Product

[0460] Montage DNA gel extraction kit #LSKG ELO 50 (Millipore) was used.
1.6 Ligation of IL-1Ra cDNA and pSUMO Vector (See FIGS. 1A and 1B)
1. Combine 50μg of vector (1μl pSUMO vector diluted with 4 μl nuclease free water to make a final concentration of 50μg/μl) with cDNA to be inserted to a total volume of 10μl (1 μl diluted vector plus 9 μl digested PCR product).

### 2. Add 10 μl of 2× Ligation Buffer and Mix.

[0461] 3. Add 1 μl of T4 DNA Ligase, mixed and centrifuged.
4. Placed at room temperature for 1 hour.
5. Move to transformation.
1.7 Transformation of E. coli DH5α
1. Thaw DH5α cells on ice.
2. 30 μl DH5α cell suspension was used per transformation.
3. 2 μl of ligated product was mixed with the 30 μl DH5α cell suspension.
4. Place the cells on ice for 45 min.
5. Heat shock at 42° C. for 90 seconds in a water bath.
6. Place cells on ice for 5 minutes.
7. Add 250 μl SOC culture medium, and then shake the cells at 37° C./200 rpm for 1 hr.
8. Plate 100 μl of cells suspension on LB agar plate with 100 μg/ml ampicillin and incubate at 37° C. overnight.

### 1.8 Plasmid DNA Analysis

[0462] 1. Pick 1-10 colonies, and PCR was conducted with a T7 forward primer and a reverse primer which is used to amplify specific IL-1ra gene to identify the positive colonies.
2. incubate 3 to 5 positive colonies into 5 ml broth medium with μg/ml ampicillin.
3. Shake at 37° C./250 rpm overnight.
4. Extract plasmid DNA.

### 1.9 Sequencing of Plasmid DNA (See FIG. 2)

[0463] 1. The extracted plasmid DNA was sequenced with a T7 forward primer and a pSUMO vector specific reverse primer.
2. After sequencing, the pSUMO expression plasmid carrying IL-1ra cDNA was stored at −80° C., and was ready to be transformed into the E. coli strain OrigamiB (DE3).
2. Expression of interleukin-1 receptor antagonistic proteinin E. coli Note: The following concentrations/volumes of reagents represent culture volume of 1 liter.
2.1 Transformation of E. coli origamiB (DE3)
1. Thaw 20 μl E. coli origamiB (DE3) cells on ice.
2. Add 1 plof pSUMO expression plasmid carrying IL-1ra cDNA to the competent cells, and stirred gently and mixed.
3. Tubes were placed on ice for 5 minutes.
4. Heat shock at 42° C. for 30 seconds in a water bath.
5. Place the cells on ice for 2 minutes.
6. Add 80 μl SOC medium.
7. Incubate cells at 37° C. for 1 hour.
8. Plate 100 μl cells suspension on LB/Ampicillin (100μg/ml) agar plates and culture at 37° C. overnight.

### 2.2 Protein Expression

[0464] 1. Medium preparation: prepare 1 liter of LB medium, preheat at 37° C. overnight, ampicillin was added before use to make a final concentration of 100μg/ml.
2. Seed culture: pick a good colony of transformed origamiB (DE3) and incubate into a 50 ml flask containing 12.5 ml of LB medium with 100μg/ml ampicillin, and then culture at 37° C. overnight.
3. Preparative culture: incubate 4 ml of overnight cultured origamiB (DE3) cells into 1 liter of preheated LB medium with 100μg/ml ampicillin.
Note: strains stored in glycerol should be made and stored at −80° C. (400μl of culture and 600 μl of sterile glycerol).
Culture samples were collected before and after IPTG induction, and analyze the protein expression by SDS-PAGE.
4. IPTG induction: after the OD600 reaches 0.4 (takes about 3 hr), induce protein expression by adding 48 mg IPTG (isopropyl-beta-D-thiogalactopyranoside) (final concentration of IPTG is 0.2 mM) and culture for additional 3 hours.
5. Cell collection: collect cells with centrifugation at 5500 rpm for 10 minutes.

### 2.3 Extraction: Cell Lysis

[0465] 1. Re-suspend the cell with 15 ml of Bugbuster protein extraction reagent.
2. Add 15 μl Benzonase nuclease and 100 μl of 100 mg/ml PMSF (protease inhibitor) for cell lysis.
3. Incubate 15 min at room temperature with rotation.
4. Load 2 ml cell lysate into 2 ml microcentrifuge tubes.
5. Centrifuge at 14,000 rpm for 30 minutes at 4° C. in a microcentrifuge.
6. The precipitate (inclusion bodies) is solubilized in 8 ml of 50 mM HEPES-NaOH pH7.5, 6M guanidine HCl, 25 mM DTT and left for 1 h at 4° C.
7. Insoluble material was removed by centrifugation at 14,000 rpm for 30 min at 4° C.
8. Store the supernatants (contains solubilized protein) at −20° C.

### 2.4 His-Tag Purification

[0466] TALON columns (Clontech, #635601, 2 ml, 2-4 mg binding capacity per column. Stored at 4° C.) was used.
[0467] 1. Before use, flick the column to make the resin fall to the bottom.
[0468] 2. Place column in the 2 ml microcentrifuge tube, remove the top cap and centrifuge at 1000 rpm for 2 minutes.
[0469] 3. Add 1 ml equilibration buffer (50 mM sodium phosphate, 6M guanidineHCl, 500 mM NaCl), and fully suspend the resin.
[0470] 4. Centrifuge the column at 1000 rpm for 2 minutes.
[0471] 5. Repeat the equilibrating steps.
[0472] 6. Add 1.5 ml of concentrated sample to each column.
[0473] 7. Flick the column to suspend resin fully, and then rotate the column for 5 minutes at 4° C.
[0474] 8. Centrifuge at 1000 rpm for 2 minutes.
[0475] 9. Wash the column with 1 ml washing buffer (same as equilibration buffer), fully suspend the resin and rotate the column for 5 min.
[0476] 10. Centrifuge at 1000 rpm for 2 minutes.
[0477] 11. Repeat the washing steps.
[0478] 12. Elute the tagged protein with 700μl elution buffer (50 mM sodium phosphate, 6M guanidineHCl, 500 mM NaCl, 150 nM imidazole) at 1000 rpm for 2 minutes.
[0479] 13. Collect the eluate.

### 2.5 Protein Refolding

[0480] 1. Prepare the refolding solution (50 mM HEPES pH7.5, 0.2M NaCl, 1 mM DTT, 1M NDSB201). NDSB201 is 3-(1-pyridine)-1-propene sulfonate.
2. Mix purified protein and refolding solution at a 1:5 ratio, and vortex vigorously immediately for 30 seconds.
3. Rotate the sample for 1 hr at 4° C.
4. Concentrate and dialyse the sample.

### 2.6 Sample Concentration

[0481] Column: Amicon Ultra-430 kDa cut-off centrifugal filter (Millipore, #UFC803024)
1. 4 ml sample was loaded on the upper portion of the Amicon centrifuge tubes.
2. Centrifuge at 3,000 rpm for 10 minutes at 4° C. or until the volume on the upper fraction reaches 1 ml.
3. Collect the concentrated sample for dialysis.

### 2.7 Dialysis

### Equipment: D-tube Dialyzer Maxi, MWCO 6-8 (Novagen, #71509-3)

[0482] 1. Equilibrate the Dialyzer membrane by filling the dialyzer with 2 ml deionized water and place at room temperature for 5 minutes.
2. Discard the water, and load 2 ml of sample into each dialyzer.
3. Close the dialyzer and put into the floating holder.
4. Dialyze sample with 1 liter 50 mM Tris-HCl, 500 mM NaCl buffer overnight at 4° C. to remove guanidine-HCl.
5. Collect the dialyzed sample.
6. Check the protein on SDS-PAGE before His-Tag removal step.
2.8 SUMO tag removal
1. Add 5 μl SUMO protease into 500 μl of dialyzed IL-1ra, and incubate at 37° C. for 1 hour.
2. Remove the His-Tag using a Talon column.
3. Load 100 μl of resin into an empty 1.5 ml microcentrifuge tube.
4. Centrifuge at 3,000 rpm and remove the storing buffer.
5. Add 500 μl 50 mM Tris-HCl, 500 mM NaCl to suspend and equilibrate the resin.
6. Centrifuge at 3,000 rpm, and remove the equilibrating buffer.
7. Add 500 μl digested sample into centrifuge tubes containing equilibrated resin.
8. Mix the resin and protein, rotate for 5 minutes at 4° C.
9. Centrifuge at 3000 rpm and 4° C. to separate the resin, collect the supernatant containing cleaved, separated IL-1ra.
10. Analyze the sample by 15% SDS-PAGE.
11. The sample purity was analyzed byRP-HPLC, see FIG. 4, and purify the sample with RP-HPLC, if necessary.
12. The peptide sequence could be determined by mass spectrum and peptide mass fingerprinting, see FIGS. 5 and 6.
The cDNA sequence for the insulin receptor binding polypeptide-linking group-IL-1Ra (comprising two copies of the linking group)

(SEQ ID NO: 505)
TTTGTCAATCAGCACCTTTGTGGTTCTCACCTGGTGGAGGCTCTGTACC
TGGTGTGTGGGGAACGTGGTTTCTTCTACACACCCAAGACCGGCTCGGG
CTCGTCGTCGGCTGCTGCTCCCCAGACCGGCATTGTGGAGCAGTGCTGC
ACCAGCATCTGCTCCCTCTACCAACTGGAGAACTACTGCAACGGCGGCG
GCGGCTCGGGCGGCGGCGGCTCGCGACCCTCTGGGAGAAAATCCAGCAA
GATGCAAGCCTTCAGAATCTGGGATGTTAACCAGAAGACCTTCTATCTG
AGGAACAACCAACTAGTTGCTGGATACTTGCAAGGACCAAATGTCAATT
TAGAAGAAAAGATAGATGTGGTACCCATTGAGCCTCATGCTCTGTTCTT
GGGAATCCATGGAGGGAAGATGTGCCTGTCCTGTGTCAAGTCTGGTGAT
GAGACCAGACTCCAGCTGGAGGCAGTTAACATCACTGACCTGAGCGAGA
ACAGAAAGCAGGACAAGCGCTTCGCCTTCATCCGCTCAGACAGTGGCCC
CACCACCAGTTTTGAGTCTGCCGCCTGCCCCGGTTGGTTCCTCTGCACA
GCGATGGAAGCTGACCAGCCCGTCAGCCTCACCAATATGCCTGACGAAG
GCGTCATGGTCACCAAATTCACTTCCAGGAGGACGAGTAG;

The amino acid sequence of the insulin receptor binding polypeptide-linking group-IL-1Ra (comprising two copies of the linking group) (IN-7)

(SEQ ID NO: 91)
FVNQHLCGSHLVEALYLVCGERGFFYTPKTGSGSSSAAAPQTGIVEQCC
TSICSLYQLENYCNGGGGSGGGGSRPSGRKSSKMQAFRIWDVNQKTFYL
RNNQLVAGYLQGPNVNLEEKIDVVPIEPHALFLGIHGGKNICLSCVKSG
DETRLQLEAVNITDLSENRKQDKRFAFIRSDSGPTTSFESAACPGWFLC
TAMEADQPVSLTNMPDEGVMVTKFYFQEDE;

The cDNA sequence for the Exendin-4-linking group-IL-1Ra (comprising two copies of the linking group)

(SEQ ID NO: 506)
CATGGTGAAGGAACATTTACCAGTGACTTGTCAAAACAGATGGAAGAGG
AGGCAGTGCGGTTATTTATTGAGTGGCTTAAGAACGGAGGACCAAGTAG
CGGGGCACCTCCGCCATCGGGCGGCGGCGGCTCGGGCGGCGGCGGCTCG
CGACCCTCTGGGAGAAAATCCAGCAAGATGCAAGCCTTCAGAATCTGGG
ATGTTAACCAGAAGACCTTCTATCTGAGGAACAACCAACTAGTTGCTGG
ATACTTGCAAGGACCAAATGTCAATTTAGAAGAAAAGATAGATGTGGTA
CCCATTGAGCCTCATGCTCTGTTCTTGGGAATCCATGGAGGGAAGATGT
GCCTGTCCTGTGTCAAGTCTGGTGATGAGACCAGACTCCAGCTGGAGGC
AGTTAACATCACTGACCTGAGCGAGAACAGAAAGCAGGACAAGCGCTTC
GCCTTCATCCGCTCAGACAGTGGCCCCACCACCAGTTTTGAGTCTGCCG
CCTGCCCCGGTTGGTTCCTCTGCACAGCGATGGAAGCTGACCAGCCCGT
CAGCCTCACCAATATGCCTGACGAAGGCGTCATGGTCACCAAATTCTAC
TTCCAGGAGGACGAGTAG;

The amino acid sequence of the Exendin-4-linking group-IL-1Ra (comprising two copies of the linking group) (G-3)

(SEQ ID NO: 3)
HGEGTFTSDLSKQMEEEAVRLFIEWLKNGGPSSGAPPPSGGGGSGGGGS
RPSGRKSSKMQAFRIWDVNQKTFYLRNNQLVAGYLQGPNVNLEEKIDVV
PIEPHALFLGIHGGKMCLSCVKSGDETRLQLEAVNITDLSENRKQDKRF
AFIRSDSGPTTSFESAACPGWFLCTAMEADQPVSLTNMPDEGVMVTKFY
FQEDE;

[0483] The cDNA sequence for GLP-1 receptor binding polypeptide-linking group-IL-1Ra (comprising two copies of the linking group)

(SEQ ID NO: 507)
CATGGTGAAGGAACATTTACCAGTGACGTGTCGTCGTACCTCGAGGAGC
AGGCTGCTAAGGAGTTTATTGCTTGGCTCGTGAAGGGCCGAGGCGGCGG
CGGCTCGGGCGGCGGCGGCTCGCGACCCTCTGGGAGAAAATCCAGCAAG
ATGCAAGCCTTCAGAATCTGGGATGTTAACCAGAAGACCTTCTATCTGA
GGAACAACCAACTAGTTGCTGGATACTTGCAAGGACCAAATGTCAATTT
AGAAGAAAAGATAGATGTGGTACCCATTGAGCCTCATGCTCTGTTCTTG
GGAATCCATGGAGGGAAGATGTGCCTGTCCTGTGTCAAGTCTGGTGATG
AGACCAGACTCCAGCTGGAGGCAGTTAACATCACTGACCTGAGCGAGAA
CAGAAAGCAGGACAAGCGCTTCGCCTTCATCCGCTCAGACAGTGGCCCC
ACCACCAGTTTTGAGTCTGCCGCCTGCCCCGGTTGGTTCCTCTGCACAG
CGATGGAAGCTGACCAGCCCGTCAGCCTCACCAATATGCCTGACGAAGG
CGTCATGGTCACCAAATTCTACTTCCAGGAGGACGAGTAG;

[0484] The amino acid sequence of the GLP-1 receptor binding polypeptide-linking group-IL-1Ra (comprising two copies of the linking group)

(SEQ ID NO: 20)
HGEGTFTSDVSSYLEEQAAKEFIAWLVKGRGGGGSGGGGSRPSGRKSSK
MQAFRIWDVNQKTFYLRNNQLVAGYLQGPNVNLEEKIDVVPIEPHALFL
GIHGGKMCLSCVKSGDETRLQLEAVNITDLSENRKQDKRFAFIRSDSGP
TTSFESAACPGWFLCTAMEADQPVSLTNMPDEGVMVTKFYFQEDE.

### Construction of a Fusion Gene for GLP-1 Receptor Binding Polypeptide—Linking Group-IL-1Ra and Expression of the Fusion Protein

[0485] The cDNA fragments encoding GLP-1 and IL-1Ra were amplified by PCR procedure, using specific primers for GLP-1 and IL-1Ra (P1, GLP-1 forward primer:

(SEQ ID NO: 508)
5′-GGCGGTCTCTAGGTCATGGTGAAGGAACATTTA-3′;

P2, GLP-1 reverse primer:

(SEQ ID NO: 509)
5′-CAGAGGGTCGCGAGCCGCCGCCGCCCGAGCCGCCGCCGCCTCGG
CCCTTCACGA GCCA-3′;

P3, IL-1Ra forward primer:

(SEQ ID NO: 510)
5′-GGCCGAGGCGGCGGCGGCTCGGGCGGCGGCGGCTCGCGACCCTCTG
GGAGAAAA-3′;

P4, IL-1Ra reverse primer:

(SEQ ID NO: 511)
5′-GGCGGATCCCTACTCGTCCTCCTGGAAGTAGAATTT G-3′

and the plasmids with GLP-1 and IL-1Ra genes as the templates. The restriction enzyme sites Bsa 1 and Bam HI were introduced respectively into the primers P1 and P4. The primers P2 and P3 have a complementary region of 46 base pairs in which a linking group encoding a decapeptide is contained. A fusion gene encoding GLP-1 and IL-1Ra was amplified by overlapping PCR using the primers P1 and P4 and the two above-mentioned PCR products as the templates. The fusion gene for GLP-1 and IL-1Ra were linked by two copies of the linking group GGGGS, an then the fusion gene for GLP-1 and IL-1Ra was digested with the restriction enzymes Bsa 1 and Bam HI and ligated into the vector pSUMO digested with the same enzymes, resulting in a recombinant expression plasmid comprising the fusion gene for GLP-1 and IL-1Ra. After the expression plasmid was verified by sequencing, the expression plasmid was transformed into E. coli. OrigamiB (DE3) to express the fusion protein of GLP-1 and IL-1Ra. The procedures for construction of the expression plasmid, transformation into the E. coli. OrigamiB and expression and purification of the fusion protein are all the same as those in clone and expression of the gene for interleukin-1 receptor antagonist.

[0486] The strategies for construction and expression of the fusion gene for the insulin receptor binding polypeptide-linking group-IL-1Ra, the GIP receptor binding polypeptide-linking group-IL-1Ra and Exendin-4-linking group-IL-1Ra are the same as those in construction and expression of the fusion gene for the GLP-1 receptor binding polypeptide-linking group-IL-1Ra.

[0487] The primers in the invention were synthesized by using an oligonucleotide synthesizer. The GLP-1 receptor binding polypeptide, the GIP receptor binding polypeptide, the Exendin-4 analogue, the insulin receptor binding polypeptide, and the interleukin-1 receptor antagonistic protein, even the cDNA for the full length fusion protein of the present invention, can all be synthesized chemically. Many biotechnology companies domestic and abroad provide service for synthesis of a full-length gene. The gene sequences of the cDNAs for the native human albumin and IL-1Ra can be obtained with RT-PCR from hepatic tissues of human. In addition, the cDNAs for the human albumin and IL-1Ra can be purchased from many commercial companies, such as Origene, Sino Biological Inc., etc. Methods of obtaining and expressing the cDNA for human albumin can further be referred to the literature (Lawn, et al., “The sequence of human serum albumin cDNA and its expression in E. coli.” Nucleic Acids Res. 1981, 9 (22): 6103-6114). Methods of obtaining and expressing the cDNA for IL-1Ra can be referred to the literature (Eisenberg, et al., “Primary structure and functional expression from complementary DNA of a human interleukin-1 receptor antagonist.” Nature, 1990, 343: 341-346).

[0488] The cDNA sequence for Human albumin

(SEQ ID NO: 512)
GATGCAC ACAAGAGTGA GGTTGCTCAT CGGTTTAAAG
ATTTGGGAGA AGAAAATTTC AAAGCCTTGGTGTTGATTGC
CTTTGCTCAG TATCTTCAGC AGTGTCCATT TGAAGATCAT
GTAAAATTAGTGAATGAAGT AACTGAATTT GCAAAAACAT
GTGTTGCTGA TGAGTCAGCT GAAAATTGTGACAAATCACT
TCATACCCTT TTTGGAGACA AATTATGCAC AGTTGCAACT
CTTCGTGAAACCTATGGTGA AATGGCTGAC TGCTGTGCAA
AACAAGAACC TGAGAGAAAT GAATGCTTCTTGCAACACAA
AGATGACAAC CCAAACCTCC CCCGATTGGT GAGACCAGAG
GTTGATGTGATGTGCACTGC TTTTCATGAC AATGAAGAGA
CATTTTTGAA AAAATACTTA TATGAAATTGCCAGAAGACA
TCCTTACTTT TATGCCCCGG AACTCCTTTT CTTTGCTAAA
AGGTATAAAGCTGCTTTTAC AGAATGTTGC CAAGCTGCTG
ATAAAGCTGC CTGCCTGTTG CCAAAGCTCGATGAACTTCG
GGATGAAGGG AAGGCTTCGT CTGCCAAACA GAGACTCAAG
TGTGCCAGTCTCCAAAAATT TGGAGAAAGA GCTTTCAAAG
CATGGGCAGT AGCTCGCCTG AGCCAGAGATTTCCCAAAGC
TGAGTTTGCA GAAGTTTCCA AGTTAGTGAC AGATCTTACC
AAAGTCCACACGGAATGCTG CCATGGAGAT CTGCTTGAAT
GTGCTGATGA CAGGGCGGAC CTTGCCAAGTATATCTGTGA
AAATCAAGAT TCGATCTCCA GTAAACTGAA GGAATGCTGT
GAAAAACCTCTGTTGGAAAA ATCCCACTGC ATTGCCGAAG
TGGAAAATGA TGAGATGCCT GCTGACTTGCCTTCATTAGC
TGCTGATTTT GTTGAAAGTA AGGATGTTTG CAAAAACTAT
GCTGAGGCAAAGGATGTCTT CCTGGGCATG TTTTTGTATG
AATATGCAAG AAGGCATCCT GATTACTCTGTCGTGCTGCT
GCTGAGACTT GCCAAGACAT ATGAAACCAC TCTAGAGAAG
TGCTGTGCCGCTGCAGATCC TCATGAATGC TATGCCAAAG
TGTTCGATGA ATTTAAACCT CTTGTGGAAGAGCCTCAGAA
TTTAATCAAA CAAAATTGTG AGCTTTTTGA GCAGCTTGGA
GAGTACAAATTCCAGAATGC GCTATTAGTT CGTTACACCA
AGAAAGTACC CCAAGTGTCA ACTCCAACTCTTGTAGAGGT
CTCAAGAAAC CTAGGAAAAG TGGGCAGCAA ATGTTGTAAA
CATCCTGAAGCAAAAAGAAT GCCCTGTGCA GAAGACTATC
TATCCGTGGT CCTGAACCAG TTATGTGTGTTGCATGAGAA
AACGCCAGTA AGTGACAGAG TCACCAAATG CTGCACAGAA
TCCTTGGTGAACAGGCGACC ATGCTTTTCA GCTCTGGAAG
TCGATGAAAC ATACGTTCCC AAAGAGTTTAATGCTGAAAC
GTTCACCTTC CATGCAGATA TATGCACACT TTCTGAGAAG
GAGAGACAAATCAAGAAACA AACTGCACTT GTTGAGCTTG
TGAAACACAA GCCCAAGGCA ACAAAAGAGCAACTGAAAGC
TGTTATGGAT GATTTCGCAG CTTTTGTAGA GAAGTGCTGC
AAGGCTGACGATAAGGAGAC CTGCTTTGCC GAGGAGGGTA
AAAAACTTGT TGCTGCAAGT CAAGCTGCCTTAGGCTTATA A.

[0489] The amino acid sequence of human albumin

(SEQ ID NO: 513)
[sequence omitted]

[0490] The strategies for connection of human albumin to several above-mentioned fusion genes, the construction, and expression of the fusion protein are the same as those in construction of the fusion gene for the GLP-1 receptor binding polypeptide-linking group-IL-1Ra and expression of the fusion protein.

[0491] The cDNA sequence for the GIP-linking group-IL-1Ra (comprising two copies of the linking group)

(SEQ ID NO: 514)
TACGCGGAAGGGACTTTCATCAGTGACTACAGTATTGCCATGGACAAGA
TTCACCAACAAGACTTTGTGAACTGGCTGCTGGCCCAAAAGGGGAAGAA
GAATGACTGGAAACACAACATCACCCAGGGCGGCGGCGGCTCGGGCGGC
GGCGGCTCGCGACCCTCTGGGAGAAAATCCAGCAAGATGCAAGCCTTCA
GAATCTGGGATGTTAACCAGAAGACCTTCTATCTGAGGAACAACCAACT
AGTTGCTGGATACTTGCAAGGACCAAATGTCAATTTAGAAGAAAAGATA
GATGTGGTACCCATTGAGCCTCATGCTCTGTTCTTGGGAATCCATGGAG
GGAAGATGTGCCTGTCCTGTGTCAAGTCTGGTGATGAGACCAGACTCCA
GCTGGAGGCAGTTAACATCACTGACCTGAGCGAGAACAGAAAGCAGGAC
AAGCGCTTCGCCTTCATCCGCTCAGACAGTGGCCCCACCACCAGTTTTG
AGTCTGCCGCCTGCCCCGGTTGGTTCCTCTGCACAGCGATGGAAGCTGA
CCAGCCCGTCAGCCTCACCAATATGCCTGACGAAGGCGTCATGGTCACC
AAATTCTACTTCCAGGAGGACGAGTAG.

[0492] The amino acid sequence of the GIP receptor binding polypeptide-linking group-IL-1Ra (comprising two copies of the linking group) (non-acylated GI-4 at N-terminal)

(SEQ ID NO: 158)
YAEGTFISDYSIAMDKIHQQDFVNWLLAQKGKKNDWKHNITQGGGGSGG
GGSRPSGRKSSKMQAFRIWDVNQKTFYLRNNQLVAGYLQGPNVNLEEKI
DVVPIEPHALFLGIHGGKMCLSCVKSGDETRLQLEAVNITDLSENRKQD
KRFAFIRSDSGPTTSFESAACPGWFLCTAMEADQPVSLTNMPDEGVMVT
KFYFQEDE.

[0493] (2,5-dioxopyrrolidin-1-yl)acetate

[0494] Acetic acid (1.5 g, 25 mM) was dissolved in methylene chloride (15 ml), DCC (5.16 g, 25 mM) and a solution of N-hydroxyl butanimide (2.88 g, 25 mM) in dioxan (5 ml) was added, stirred at 4° C. overnight, and at room temperature for 2 h. The mixture was filtered, the solvent was evaporated under a reduced pressure, petroleum ether (b.p. 60-80° C.) was added, the crystal was filtered and recrystallized in ethyl acetate to yield a colourless needle product (3.75 g, yield: 95.5%), m.p. 131-134° C.

[0495] Acylation of the N-terminus of the GIP fusion protein

[0496] The single chain fusion protein of GIP receptor binding polypeptide and interleukin-1 receptor antagonistic protein was prepared according to the above procedure. With respect to the fusion proteins which need to be acylated at the N-terminus, such as GI-2 to GI-5, GI-13 to 15, GI-22, etc., the fusion proteins were dissolved in 0.01 NHCl, the resultant solution was adjusted with NaOH to pH 6.9, the equimolar amount of (2,5-dioxopyrrolidin-1-yl) acetate salt was added with one tenth of the amount added each time and the alkali solution was added every 30 min to keep at pH 6.9. The reaction was stirred overnight and purified on RP-HPLC C18 column. Buffer A: 0.1% TFA in aqueous solution, 10% acetonitrile; buffer B: 0.1% TFA in aqueous solution, 80% acetonitrile.

[0497] With the above-mentioned method, single chain fusion proteins of the GLP-1 receptor binding polypeptide and the interleukin-1 receptor antagonistic protein were prepared, their molecular weights were determined with mass spectrometry, and the synthesized compounds were verified by determining the structure of the single chain polypeptide through sequencing, with the results as follows:

G-1: the calculated molecular weight value thereof is 21296.0 and the molecular weight determined by mass spectrometry is 21298.3, with the sequencing result consistent with the sequence shown in the instant application;
G-2: the calculated molecular weight value thereof is 21611.3 and the molecular weight determined by mass spectrometry is 21613.4, with the sequencing result consistent with the sequence shown in the instant application;
G-3: the calculated molecular weight value thereof is 21926.5 and the molecular weight determined by mass spectrometry is 21928.1, with the sequencing result consistent with the sequence shown in the instant application;
G-4: the calculated molecular weight value thereof is 22241.8 and the molecular weight determined by mass spectrometry is 22243.2, with the sequencing result consistent with the sequence shown in the instant application;
G-5: the calculated molecular weight value thereof is 20518.1 and the molecular weight determined by mass spectrometry is 20520.6, with the sequencing result consistent with the sequence shown in the instant application;
G-6: the calculated molecular weight value thereof is 20719.3 and the molecular weight determined by mass spectrometry is 20721.0, with the sequencing result consistent with the sequence shown in the instant application;
G-7: the calculated molecular weight value thereof is 21034.6 and the molecular weight determined by mass spectrometry is 21035.8, with the sequencing result consistent with the sequence shown in the instant application;
G-8: the calculated molecular weight value thereof is 21349.9 and the molecular weight determined by mass spectrometry is 21351.7, with the sequencing result consistent with the sequence shown in the instant application;
G-18: the calculated molecular weight value thereof is 20522.1 and the molecular weight determined by mass spectrometry is 20524.3, with the sequencing result consistent with the sequence shown in the instant application;
G-19: the calculated molecular weight value thereof is 20780.3 and the molecular weight determined by mass spectrometry is 20781.8, with the sequencing result consistent with the sequence shown in the instant application;
G-20: the calculated molecular weight value thereof is 21095.6 and the molecular weight determined by mass spectrometry is 21098.0, with the sequencing result consistent with the sequence shown in the instant application;
G-21: the calculated molecular weight value thereof is 21410.9 and the molecular weight determined by mass spectrometry is 21412.4, with the sequencing result consistent with the sequence shown in the instant application;
G-22: the calculated molecular weight value thereof is 21873.5 and the molecular weight determined by mass spectrometry is 21875.6, with the sequencing result consistent with the sequence shown in the instant application;
G-81: the calculated molecular weight value thereof is 89011.3 and the molecular weight determined by mass spectrometry is 89013.6, with the sequencing result consistent with the sequence shown in the instant application;
G-82: the calculated molecular weight value thereof is 88958.2 and the molecular weight determined by mass spectrometry is 88960.1, with the sequencing result consistent with the sequence shown in the instant application;
G-83: the calculated molecular weight value thereof is 89011.3 and the molecular weight determined by mass spectrometry is 89013.0, with the sequencing result consistent with the sequence shown in the instant application;
G-84: the calculated molecular weight value thereof is 88958.2 and the molecular weight determined by mass spectrometry is 88960.5, with the sequencing result consistent with the sequence shown in the instant application.

[0498] With the above-mentioned method, fusion proteins were prepared on the basis of insulin receptor binding polypeptide and interleukin-1 receptor antagonistic protein, their molecular weights were determined with mass spectrometry, and the synthesized compounds were verified by determining the structure of the single chain polypeptide through sequencing, with the results as follows:

IN-1: the calculated molecular weight value thereof is 23900.0 and the molecular weight determined by mass spectrometry is 23902.8, with the sequencing result consistent with the sequence shown in the instant application;
IN-2: the calculated molecular weight value thereof is 23884.0 and the molecular weight determined by mass spectrometry is 23886.7, with the sequencing result consistent with the sequence shown in the instant application;
IN-3: the calculated molecular weight value thereof is 23835.8 and the molecular weight determined by mass spectrometry is 23837.2, with the sequencing result consistent with the sequence shown in the instant application;
IN-4: the calculated molecular weight value thereof is 24215.3 and the molecular weight determined by mass spectrometry is 24317.5, with the sequencing result consistent with the sequence shown in the instant application;
IN-5: the calculated molecular weight value thereof is 24199.2 and the molecular weight determined by mass spectrometry is 24151.3, with the sequencing result consistent with the sequence shown in the instant application;
IN-6: the calculated molecular weight value thereof is 24151.1 and the molecular weight determined by mass spectrometry is 24153.7, with the sequencing result consistent with the sequence shown in the instant application;
IN-7: the calculated molecular weight value thereof is 24530.6 and the molecular weight determined by mass spectrometry is 24532.4, with the sequencing result consistent with the sequence shown in the instant application;
IN-8: the calculated molecular weight value thereof is 24514.5 and the molecular weight determined by mass spectrometry is 24517.1, with the sequencing result consistent with the sequence shown in the instant application;
IN-9: the calculated molecular weight value thereof is 24466.4 and the molecular weight determined by mass spectrometry is 24469.0, with the sequencing result consistent with the sequence shown in the instant application;
IN-10: the calculated molecular weight value thereof is 24845.9 and the molecular weight determined by mass spectrometry is 24847.3, with the sequencing result consistent with the sequence shown in the instant application;
IN-11: the calculated molecular weight value thereof is 24829.8 and the molecular weight determined by mass spectrometry is 24830.9, with the sequencing result consistent with the sequence shown in the instant application;
IN-12: the calculated molecular weight value thereof is 24781.6 and the molecular weight determined by mass spectrometry is 24783.0, with the sequencing result consistent with the sequence shown in the instant application;
IN-13: the calculated molecular weight value thereof is 23309.3 and the molecular weight determined by mass spectrometry is 23311.2, with the sequencing result consistent with the sequence shown in the instant application;
IN-14: the calculated molecular weight value thereof is 23293.3 and the molecular weight determined by mass spectrometry is 23295.1, with the sequencing result consistent with the sequence shown in the instant application;
IN-15: the calculated molecular weight value thereof is 23245.1 and the molecular weight determined by mass spectrometry is 23246.8, with the sequencing result consistent with the sequence shown in the instant application;
IN-16: the calculated molecular weight value thereof is 23624.6 and the molecular weight determined by mass spectrometry is 23626.5, with the sequencing result consistent with the sequence shown in the instant application;
IN-17: the calculated molecular weight value thereof is 23608.6 and the molecular weight determined by mass spectrometry is 23610.0, with the sequencing result consistent with the sequence shown in the instant application;
IN-18: the calculated molecular weight value thereof is 23560.4 and the molecular weight determined by mass spectrometry is 23561.7, with the sequencing result consistent with the sequence shown in the instant application;
IN-19: the calculated molecular weight value thereof is 23939.9 and the molecular weight determined by mass spectrometry is 23941.6, with the sequencing result consistent with the sequence shown in the instant application;
IN-20: the calculated molecular weight value thereof is 23923.9 and the molecular weight determined by mass spectrometry is 23925.3, with the sequencing result consistent with the sequence shown in the instant application;
IN-21: the calculated molecular weight value thereof is 23875.7 and the molecular weight determined by mass spectrometry is 23877.2, with the sequencing result consistent with the sequence shown in the instant application;
IN-22: the calculated molecular weight value thereof is 24255.2 and the molecular weight determined by mass spectrometry is 24256.9, with the sequencing result consistent with the sequence shown in the instant application;
IN-23: the calculated molecular weight value thereof is 24239.1 and the molecular weight determined by mass spectrometry is 24241.5, with the sequencing result consistent with the sequence shown in the instant application;
IN-24: the calculated molecular weight value thereof is 24191.0 and the molecular weight determined by mass spectrometry is 24192.6, with the sequencing result consistent with the sequence shown in the instant application;
IN-62: the calculated molecular weight value thereof is 24530.6 and the molecular weight determined by mass spectrometry is 24537.1, with the sequencing result consistent with the sequence shown in the instant application;
IN-63: the calculated molecular weight value thereof is 24514.5 and the molecular weight determined by mass spectrometry is 24525.5, with the sequencing result consistent with the sequence shown in the instant application;
IN-64: the calculated molecular weight value thereof is 24466.4 and the molecular weight determined by mass spectrometry is 24474.7, with the sequencing result consistent with the sequence shown in the instant application;
IN-65: the calculated molecular weight value thereof is 24503.6 and the molecular weight determined by mass spectrometry is 24515.4, with the sequencing result consistent with the sequence shown in the instant application;
IN-66: the calculated molecular weight value thereof is 25064.2 and the molecular weight determined by mass spectrometry is 25073.6, with the sequencing result consistent with the sequence shown in the instant application;
IN-67: the calculated molecular weight value thereof is 24933.0 and the molecular weight determined by mass spectrometry is 24942.0, with the sequencing result consistent with the sequence shown in the instant application;
IN-68: the calculated molecular weight value thereof is 91615.4 and the molecular weight determined by mass spectrometry is 91624.9, with the sequencing result consistent with the sequence shown in the instant application;
IN-69: the calculated molecular weight value thereof is 91615.4 and the molecular weight determined by mass spectrometry is 91627.2, with the sequencing result consistent with the sequence shown in the instant application;
IN-70: the calculated molecular weight value thereof is 91730.6 and the molecular weight determined by mass spectrometry is 91623.3, with the sequencing result consistent with the sequence shown in the instant application.

[0499] With the above-mentioned method, fusion proteins were prepared on the basis of the GIP receptor binding polypeptide and the interleukin-1 receptor antagonistic protein, their molecular weights were determined with mass spectrometry, and the synthesized compounds were verified by determining the structure of the single chain polypeptide through sequencing, with the results as follows:

GI-1: the calculated molecular weight value thereof is 22423.2 and the molecular weight determined by mass spectrometry is 22427.0, with the sequencing result consistent with the sequence shown in the instant application;
GI-2: the calculated molecular weight value thereof is 22134.0 and the molecular weight determined by mass spectrometry is 22138.1, with the sequencing result consistent with the sequence shown in the instant application;
GI-3: the calculated molecular weight value thereof is 22449.2 and the molecular weight determined by mass spectrometry is 22456.3, with the sequencing result consistent with the sequence shown in the instant application;
GI-4: the calculated molecular weight value thereof is 22764.5 and the molecular weight determined by mass spectrometry is 22772.4, with the sequencing result consistent with the sequence shown in the instant application;
GI-5: the calculated molecular weight value thereof is 23079.8 and the molecular weight determined by mass spectrometry is 23090.7, with the sequencing result consistent with the sequence shown in the instant application;
GI-6: the calculated molecular weight value thereof is 22060.0 and the molecular weight determined by mass spectrometry is 22068.5, with the sequencing result consistent with the sequence shown in the instant application;
GI-7: the calculated molecular weight value thereof is 22375.2 and the molecular weight determined by mass spectrometry is 22384.6, with the sequencing result consistent with the sequence shown in the instant application;
GI-8: the calculated molecular weight value thereof is 22690.5 and the molecular weight determined by mass spectrometry is 22695.9, with the sequencing result consistent with the sequence shown in the instant application;
GI-9: the calculated molecular weight value thereof is 23005.8 and the molecular weight determined by mass spectrometry is 23009.2, with the sequencing result consistent with the sequence shown in the instant application;
GI-10: the calculated molecular weight value thereof is 21381.0 and the molecular weight determined by mass spectrometry is 21373.4, with the sequencing result consistent with the sequence shown in the instant application;
GI-11: the calculated molecular weight value thereof is 22351.0 and the molecular weight determined by mass spectrometry is 22360.8, with the sequencing result consistent with the sequence shown in the instant application;
GI-12: the calculated molecular weight value thereof is 21720.4 and the molecular weight determined by mass spectrometry is 21724.1, with the sequencing result consistent with the sequence shown in the instant application;
GI-13: the calculated molecular weight value thereof is 22407.0 and the molecular weight determined by mass spectrometry is 22411.5, with the sequencing result consistent with the sequence shown in the instant application;
GI-14: the calculated molecular weight value thereof is 22091.7 and the molecular weight determined by mass spectrometry is 22097.6, with the sequencing result consistent with the sequence shown in the instant application;
GI-15: the calculated molecular weight value thereof is 21776.5 and the molecular weight determined by mass spectrometry is 21782.4, with the sequencing result consistent with the sequence shown in the instant application;
GI-16: the calculated molecular weight value thereof is 20750.4 and the molecular weight determined by mass spectrometry is 20753.9, with the sequencing result consistent with the sequence shown in the instant application;
GI-17: the calculated molecular weight value thereof is 20435.1 and the molecular weight determined by mass spectrometry is 20438.7, with the sequencing result consistent with the sequence shown in the instant application;
GI-18: the calculated molecular weight value thereof is 21528.2 and the molecular weight determined by mass spectrometry is 21534.2, with the sequencing result consistent with the sequence shown in the instant application;
GI-19: the calculated molecular weight value thereof is 20609.3 and the molecular weight determined by mass spectrometry is 20613.3, with the sequencing result consistent with the sequence shown in the instant application;
GI-20: the calculated molecular weight value thereof is 21702.5 and the molecular weight determined by mass spectrometry is 21709.0, with the sequencing result consistent with the sequence shown in the instant application;
GI-21: the calculated molecular weight value thereof is 22017.7 and the molecular weight determined by mass spectrometry is 22025.6, with the sequencing result consistent with the sequence shown in the instant application;
GI-22: the calculated molecular weight value thereof is 89218.7 and the molecular weight determined by mass spectrometry is 89227.1, with the sequencing result consistent with the sequence shown in the instant application;
GI-23: the calculated molecular weight value thereof is 89144.7 and the molecular weight determined by mass spectrometry is 89153.5, with the sequencing result consistent with the sequence shown in the instant application.

[0500] Chemical Synthesis of Polypeptides

[0501] Linear polypeptides can be synthesized by Boc solid phase polypeptide synthesis or Fmoc solid phase polypeptide synthesis. If a polypeptide with a carboxyl group at the C-terminus is chemically synthesized by Fmoc method, Wang resin would be selected, while if a polypeptide with an amide at the C-terminus, Rink amide resin would be selected. If a polypeptide with a carboxyl group at the C-terminus is chemically synthesized by Boc method, Pam resin would be selected, while if a polypeptide with an amide at the C-terminus, MBHA resin would be selected. The condensation agents and activating agents are DIC and HOBT. Other alternative condensation agents include BOP, HBTU, DEPBT, etc. Amino acids are used 5 folds in excess and the time period for condensation is 1 hour.

[0502] Fmoc protective group can be removed by 50% piperidine/DMF and Boc protective group can be cleaved by TFA. Peptide bond condensation can be monitored by ninhydrin (2,2-Dihydroxyindane-1,3-dione) test.

[0503] In Fmoc solid phase polypeptide synthesis, the commonly used amino acids and protective groups are as follows:

[0504] Fmoc-Cys(Trt)-OH, Fmoc-Asp(OtBu)-OH, Fmoc-Glu(OtBu)-OH, Fmoc-His(Trt)-OH, Fmoc-Lys(Boc)-OH, Fmoc-Asn(Trt)-OH, Fmoc-Gln(Trt)-OH, Fmoc-Arg(Pmc)-OH, Fmoc-Ser(tBu)-OH, Fmoc-Thr(tBu)-OH, Boc-Trp(Boc)-OH or Fmoc-Tyr(tBu)-OH.

[0505] If the side chain amino group of lysine is used for acylation, side chain amino group of lysine could be protected by allyloxycarbonyl (aloc) group. Upon completion of synthesis of peptide sequence, allyloxycarbonyl (aloc) group can be removed using tetrakis(triphenylphosphine)palladium(0) along with a 37:2:1 mixture of DCM, acetic acid, and NMM (15 ml/g resin) in an argon atmosphere by stirring at ambient temperature for 2 hours. After reaction, the resin should be washed with 0.5% DIPEA/DMF (10 ml), 0.5% sodium diethyldithiocarbamate trihydrate/DMF (3×10 ml), and 1:1 DCM:DMF (5×10 ml). The side chain amino group of lysine may also be protected by 4-methyltrityl group (Mtt). The resin is suspended in DCM, followed by addition of TFA/TIS/DCM (1:2:97), vibrated for 10 minutes, repeated twice, and then washed with DCM, DMF and isopropyl alcohol.

[0506] After a polypeptide is synthesized by Fmoc solid phase synthesis, the cleavage reagent commonly used is a TFA. The dry resin was placed into a shaking flask, filled with an appropriate amount of TFA/TIS/H₂O (95:2.5:2.5, 10-25 mL/g resin), capped with a cover, and subjected to batch-type rotary shaking at room temperature. After 2 h, the resin was subjected to suction filtration and washed 2-3 times with fresh TFA; the filtrates were pooled, and 8-10 volumes of iced ethyl ether was added dropwise. Finally, the precipitated polypeptide crude was collected by centrifugation.

[0507] In Boc solid phase polypeptide synthesis, the commonly used amino acids and protective groups are as follows: Boc-Cys(4-MeBzl)-OH, Boc-Asp(OcHx)-OH, Boc-Glu(OcHx)-OH, Boc-His(Bom)-OH, Boc-Lys(2-Cl-Z)—OH, Boc-Asn(Xan)-OH, Boc-Arg(Tos)-OH, Boc-Ser(Bzl)-OH, Boc-Thr(Bzl)-OH, Boc-Trp(CHO)—OH and Boc-Tyr(2-Br-Z)—OH.

[0508] If the side chain amino group of a lysine is used for formation of lactam or acylation reaction, side chain amino group of lysine may be protected by allyloxycarbonyl (aloc) or Fmoc group. If carboxyl of the side chain of glutamic acid or aspartic acid is used for formation of lactam or acylation reaction, the carboxyl may be converted to an allyl ester or be protected by 9-Fluorenylmethyl group.

[0509] After a polypeptide is synthesized by solid phase Boc synthesis, PAM and MBHA resins are usually cleaved by HE For 0.1 mM resin, 5 ml of HF, together with p-cresol, p-hydroxy thiophenol, or anisole etc are added. The mixture is stirred at ice bath temperature for 1 hour. After HF is evaporated in vacuo, the polypeptide is precipitated with iced ethyl ether and collected by centrifugation. The final product is obtained after HPLC purification and subjected to freeze drying.

### Preparation of Tert-Butyl Hexadecandioyl-L-Glu(OSu)-OtBu

[0510] 5.72 g (20 mM) of hexadecanedioic acid was dissolved in 240 mL of anhydrous DMF and cooled in an ice bath. 1.48 g (20 mM) of 2-methyl-2-propyl alcohol, 2.7 g (2.25 mL, 21.4 mM) of DIC, 2.88 g (21.4 mM) of HOBT, 2.16 g (2.34 mL, 21.4 mM) of NMM, and 244 mg (2 mM) of DMAP were addedsuccessively. The mixture was stirred at room temperature overnight. 80 mL of water was added, acidified to pH 3, and extracted with ethyl acetate (80 mL×3). The organic layer was washed with 0.1 NHCl and saturated saline, dried over magnesium sulphate, and the solvent was evaporated under a reduced pressure to obtain mono-tert-butyl hexadecandioate (3.32 g, yield: 47%). Data for nuclear magnetic resonance were ¹H-NMR (CDCl₃) δ 2.35 (t, 2H), 1.56-1.66 (m, 4H), 1.44 (s, 9H), 1.21-1.35 (m, 20H).

[0511] 4.25 g (10 mM) of Fmoc-Glu-OtBu was dissolved in 30 mL of DCM, transferred into 3 g of 2-CTC resin (2-chlorotritylchloride resin, sub. 1 mM/g), and followed by adding 1.29 g (10 mM, 1.74 mL) of DIPEA. After the mixture was shaken in a shaker for 5 min, 1.93 g (15 mM, 2.6 mL) of DIPEA was further added. The mixture was shaken vigorously for one hour. To the resin was added 2.4 mL of HPLC-grade methanol and mixed for 15 min. The resin was filtered, washed with DCM (3×30 mL), DMF (2×30 mL), DCM (3×30 mL), methanol (3×30 mL) and then desiccated in vacuum.

[0512] After Fmoc was deprotected with piperidine, 3 g of the resin (3 mM) and 3.43 g (10 mM) of mono-tert-butyl hexadecandioate were added to 50 mL of anhydrous DMF, and 1.35 g (1.12 mL, 10.7 mM) of DIC, 1.44 g (10.7 mM) of HOBT, 1.3 g (10 mM, 1.74 mL) of DIPEA were added successively. After agitated at room temperature overnight, the resin was rinsed with DMF (2×30 mL) and DCM (2×30 mL).

[0513] A cleavage solution of AcOH/TFE/DCM (1:1:8) (20 mL/g resin) was prepared. The resin was suspended in half of the cleavage solution, and placed at room temperature for 30 min. The resin was filtered and washed three times with another half of the cleavage solution. The filtrates were mixed and 15 volumes of n-hexane were added. Excessive acetic acid was removed by rotary evaporation to yield tert-butyl hexadecandioyl -L-Glu-OtBu. H-NMR (CDCl₃): δ 6.25 (d, 1H), 4.53 (m, 1H), 2.42 (m, 2H), 2.21 (m, 4H), 1.92 (m, 1H), 1.58 (m, 4H), 1.47 (s, 9H), 1.22-1.43 (m, 18H).

[0514] 1 g (1.9 mM) of tert-butyl hexadecandioyl-L-Glu-OtBu was dissolved in 5 mL of anhydrous DMF/DCM (1 mL:4 mL). 0.412 g (2 mM) of DCC and 0.23 g (2 mM) of N-hydroxyl succinimide were added. The mixture was stirred at room temperature overnight. The mixture was filtered. The filtrate was diluted with ethyl acetate, washed with 0.1 NHCl and saturated saline, dried over magnesium sulphate, and evaporated under a reduced pressure to obtain tert-butyl hexadecandioyl-L-Glu (OSu)-OtBu. H-NMR (CDCl₃): δ 6.17 (d, 1H), 4.60 (m, 1H), 2.84 (s, 4H), 2.72 (m, 1H), 2.64 (m, 1H), 2.32 (m, 1H), 2.20 (m, 4H), 2.08 (m, 1H), 1.6 (m, 4H), 1.47 (s, 9H), 1.43 (s, 9H), 1.20-1.33 (m, 20H).

[0515] Tert-butyl octadecandioyl-L-Glu(OSu)-OtBu was prepared in the same procedure.

[0516] Acylation of the Protein/Polypeptide (1)

[0517] The single chain insulin analogue (10 μmol) was dissolved in 0.01NHCl at room temperature, and 0.01NNaOH was added dropwise to pH 7. Tert-butyl hexadecandioyl-L-Glu (OSu)-OtBu (12 μmol) was dissolved in acetonitrile (2 mL), and the solution of polypeptide was added. After stirred for 30 min, the mixture was acidified with 50% acetic acid, and loaded onto a RP-HPLC C5 column for purification. Buffer A: 0.1% TFA aqueous solution, 10% acetonitrile; buffer B: 0.1% TFA aqueous solution, 80% acetonitrile. The polypeptide initially purified and lyophilized was placed into TFA/TIS/H₂O (95:2.5:2.5, 10 mL). Thirty minutes later, the solvent was evaporated under a reduced pressure and the crude product was dissolved in Buffer A and lyophilized. Purification was performed using the RP-HPLC C5 column, with buffer A: 0.1% TFA aqueous solution, 10% acetonitrile and buffer B: 0.1% TFA aqueous solution, 80% acetonitrile. The acylated single chain insulin analogue was dissolved in 100 mM Na₂CO₃ (2 mL). Maleimide-PEG12-NHS (12 μmol) was added and stirred for 30 min, interleukin-1 receptor antagonistic protein (11 μmol) was added. After stirred for 5 hours, the mixture was acidified with 50% acetic acid, and loaded onto a RP-HPLC C5 column for purification. Buffer A: 0.1% TFA aqueous solution, 10% acetonitrile; buffer B: 0.1% TFA aqueous solution, 80% acetonitrile.

[0518] With the above-mentioned method, fusion proteins were prepared on the basis of the insulin receptor binding polypeptide and the interleukin-1 receptor antagonistic protein, and their molecular weights were determined with mass spectrometry as follows:

IN-33: the calculated molecular weight value thereof is 25135.4 and the molecular weight determined by mass spectrometry is 25136.9, with the sequencing result consistent with the sequence shown in the instant application;
IN-34: the calculated molecular weight value thereof is 25108.4 and the molecular weight determined by mass spectrometry is 25110.5, with the sequencing result consistent with the sequence shown in the instant application.

[0519] Synthesis of 18-Maleimidooctadecanoic Acid

[0520] Methyl 18-hydroxyoctadecanoate (4.5 g, 14.3 mM) was dissolved in 50 ml dichloromethane. Pyridine (4.53 g, 57.2 mM) was added, and cooled in a ice bath, and then p-toluenesulfonyl chloride (5.46 g, 28.6 mM) was slowly added within 1 hour. Thereafter, reaction was carried out for 16 hours under stir and 4° C. The reaction mixture was washed with a iN hydrochloric acid aqueous solution, water, saturated sodium hydrogen carbonate solution, water and saturated saline solution successively, dried, and then concentrated under a reduced pressure. Then purified by silica gel column (eluent: benzene) to give methyl 18-tosyloxyoctadecanoate (5.69 g, 85%). m.p. 67.5-68.5° C. H-NMR (CDCl₃, 270 MHz): δ1.09-1.42 (m, 26H), 1.53-1.72 (m, 4H), 2.30 (t, 2H), 2.45 (s, 3H), 3.68 (s, 3H), 4.03 (t, 2H), 7.35 (d, 2H), 7.79 (d, 2H).

[0521] A mixture of potassium phthalimide (2.96 g, 16.0 mM) and 100 ml anhydrous DMF was heated to 110° C. 80 ml methyl 18-tosyloxyoctadecanoate (5.0 g, 10.7 mM) dissolved in DMF was added dropwise and the mixture was stirred at 110° C. for 2 hours. Ice water was poured to reach a total volume of 1.2 liter, and stirred for 30 minutes. Thereafter, the precipitates were filtered and dissolved in chloroform, and then washed with water and saturated saline solution, dried over magnesium sulfate, concentrated under a reduced pressure and purified by silica gel column (eluent:benzene and methylene chloride:2:1), to give methyl 18-phtahlimideocatadecanoate (4.15 g, 88%).m.p. 82-83° C.

[0522] ¹H-NMR (CDCl₃, 270 MHz): δ1.09-1.42 (m, 26H), 1.53-1.76 (m, 4H), 2.30 (t, 2H), 3.66, 3.67 (s, t, 5H), 7.71 (m, 2H), 7.84 (m, 2H).

[0523] Methyl 18-phthalimideoctadecanoate (2.0 g, 4.51 mM), 30 ml ethanol and 80% hydrazine hydrate (0.42 ml, 6.76 mM) were heated and refluxed for 9 hours. 6N hydrochloric acid (11.3 ml, 67.6 mM) was added, heated and refluxed for 1 hour. The insoluble matter was filtered off, and the filtrate was concentrated under a reduced pressure. 30 ml of ethanol and 18.1 ml of 1N sodium hydroxide solution was added, heated and refluxed for 18 hours. The reaction was neutralized with 6N hydrochloric acid. The precipitates were collected by filtration and recrystallized in ethanol-acetic acid-water to give 18-aminooctadecanoic acid (800 mg, 59%). m.p. 172°-174° C. IR (cm): 2920, 2850, 1640, 1535, 1470, 1400 FD-MS (m/z): [M+H]⁺300.

[0524] 18-aminooctadecanoic acid (400 mg, 1.33 mM) was dissolved in 50 ml of ethanol and 25 ml of iN sodium hydroxide, at 40° C. At the same temperature, maleic anhydride (1.97 g, 20.0 mM) was slowly added within 2 hours. The reaction mixture was stirred for 30 minutes, then acidified with hydrochloric acid and subjected to centrifugation. The precipitate was filtered and washed with water, and then dried under a reduced pressure, to give N-(17-carboxyheptadecyl)maleamic acid (436 mg, 88%). m.p. 144°-147.5° C. IR (cm): 3305, 2920, 2850, 1710, 1630, 1585, 1470, 1400, 1280, 1250, 1230, 1215, 1195, 1180.

[0525] FD-MS (m/z): [M+H]⁺398

[0526] N-(17-carboxyheptadecyl)maleamic acid (400 mg, 1.01 mM), 2.83 mlacetic anhydride, and anhydrous sodium acetate (41.0 rag, 0.50 mM) was heated to 100° C., stirred for 1 hour. After cooling of the reaction, ice was added and further stirred for 1 hour. The resulting mixture was extracted with chloroform. The organic layer was washed with water and then with saturated saline solution, dried over anhydrous magnesium sulfate, concentrated under a reduced pressure and purified by silica gel column (eluent:benzene and chloroform:1:1), to give 18-maleimidooctadecanoic acid (172 mg, 45%). m.p. 101-103° C.

[0527] ¹H-NMR (CDCl₃, 270 MHz): δ1.14-1.40 (m, 26H), 1.48-1.72 (m, 4H), 2.35 (t, 2H), 3.50 (t, 2H), 6.68 (s, 2H)

[0528] IR(cm): 2920, 2850, 1710, 1470, 1450, 1410, 840, 700 FD-MS (m/z): [M+H]⁺380

[0529] Acylation of the protein/polypeptide (2): modification of the fusion protein by 18-maleimidooctadecanoic acid

[0530] 3 ml aqueous solution of fusion protein (3 mg) was mixed with 0.8 ml of 0.5 M Tris-HCl buffer (pH 9), 18-maleimidooctadecanoic acid was added slowly (in a molar ratio of 1.1). The reaction was stirred at room temperature overnight. The reaction was filtered, the filtrate was added onto Sephadex G-25 (the eluent: 10 mM ammonium bicarbonate solution). Fractions with large molecular weights were collected, and purified with a DEAE-Sepharose Fast Flow ion exchange column (the eluent: 10 mM Tris-HCl (pH 8) and 0.075 M sodium chloride solution). The collected product was desalted with Sephadex G-25 (the eluent: 10 mM ammonium bicarbonate solution) and freeze dried to obtain the product.

[0531] With the above-mentioned method, fusion proteins were prepared on the basis of the GLP-1 receptor binding polypeptide and the interleukin-1 receptor antagonistic protein, and their molecular weights were determined with mass spectrometry as follows:

G-30: the calculated molecular weight value thereof is 22278.0 and the molecular weight determined by mass spectrometry is 22279.5, which is consistent with the compound shown in the instant application;
G-31: the calculated molecular weight value thereof is 22306.0 and the molecular weight determined by mass spectrometry is 22307.8, which is consistent with the compound shown in the instant application;
G-36: the calculated molecular weight value thereof is 22251.0 and the molecular weight determined by mass spectrometry is 22252.9, which is consistent with the compound shown in the instant application;
G-38: the calculated molecular weight value thereof is 22306.0 and the molecular weight determined by mass spectrometry is 22307.2, which is consistent with the compound shown in the instant application;
G-40: the calculated molecular weight value thereof is 21534.2 and the molecular weight determined by mass spectrometry is 21535.6, which is consistent with the compound shown in the instant application;
G-42: the calculated molecular weight value thereof is 21448.1 and the molecular weight determined by mass spectrometry is 21449.3, which is consistent with the compound shown in the instant application;
G-49: the calculated molecular weight value thereof is 21447.1 and the molecular weight determined by mass spectrometry is 21448.4, which is consistent with the compound shown in the instant application.

[0532] With the above-mentioned method, fusion proteins were prepared on the basis of the insulin receptor binding polypeptide and the interleukin-1 receptor antagonistic protein, and their molecular weights were determined with mass spectrometry as follows:

IN-28: the calculated molecular weight value thereof is 24264.4 and the molecular weight determined by mass spectrometry is 24266.1, which is consistent with the compound shown in the instant application.

### Preparation of 16-(1-tert-butoxy-5-(4-(2,5-dioxo-2,5-dihydro-1H-pyrrol-1-yl)butylamino)-1,5-dioxopentyl-2-yl amino)-16-oxohexadecanoic acid

[0533] Mono-Boc-butanediamine (N-t-butoxycarbonyl-1,4-butanediamine) (1.88 g, 10 mM) and maleic anhydride (1.22 g, 12.5 mM) were dissolved in anhydrous CH₂Cl₂ (30 ml), stirred at room temperature for 2 h, and filtered to collect white precipitates. The white precipitates were rinsed with CH₂Cl₂ and then desiccated under vacuum to be used directly in the next reaction. (Z)-4-(4-(tert-butoxycarbonylamino)butylamino)-4-oxobut-2-butenoic acid (2.4 g, 8.4 mM), acetic anhydride (20 ml) and anhydrous sodium acetate (1 g, 12.2 mM) were stirred at 140° C. for 6 hr. The mixture was poured into ice water and extracted with chloroform. The organic layer was washed with water and the saturated saline, dried over anhydrous magnesium sulphate, concentrated under a reduced pressure, and purified by a silica gel column (n-hexane:ethyl acetate=100/0:50/50 v/v), yielding white solid, butyl tert-butyl-4-(2,5-dioxo-2,5-dihydro-1H-pyrrol-1-yl) carbamate (1.71 g, 6.4 mM). H NMR (300 MHz, CDCl3): δ=6.68 (s, 2H, CH═CH), 4.50 (br, 1H, NHtBoc), 3.50 (t, 2H, CH₂N), 3.08 (q, 2H, CH₂NHtBoc), 1.60-1.25 (m, 1 3 H, CH₂).

[0534] Butyl tert-butyl-4-(2,5-dioxo-2,5-dihydro-1H-pyrrol-1-yl) carbamate was dissolved in 4NHCl/dioxane, stirred at room temperature for 1 h, and the solvent was evaporated under a reduced pressure to yield 1-(4-aminobutyl)-1H-pyrrolyl-2,5-dione. 1-(4-aminobutyl)-1H-pyrrolyl-2,5-dione (1 g, 6 mM) was dissolved in 100 mM Na₂CO₃ (1 mL, pH 8) and acetonitrile (2 mL) at room temperature. Tert-butyl hexadecandioyl-L-Glu (OSu)-OtBu (4.09 g, 7.2 mM) was dissolved in acetonitrile (4 mL), stirred for 30 min, acidified with 50% acetic acid, and loaded onto a RP-HPLC C5 column for purification, yielding 16-(1-tert-butoxy-5-(4-(2,5-dioxo-2,5-dihydro-1H-pyrrol-1-yl)butylamino)-1,5-dioxopentyl-2-yl amino)-16-oxohexadecanoic acid.

Acylation of the protein/polypeptide (3)

[0535] The fusion protein and the equimolar amount of 16-(1-tert-butoxy-5-(4-(2,5-dioxo-2,5-dihydro-1H-pyrrolyl-1-yl)butylamino)-1,5-dioxopentyl-2-ylamino group)-16-oxohexadecanoic acid were dissolved in PBS with a polypeptide concentration of 10 mM. The reaction was run at room temperature for 1 h and subjected to HPLC purification. Buffer A: 0.1% TFA aqueous solution, 10% acetonitrile; buffer B: 0.1% TFA aqueous solution, 80% acetonitrile. The polypeptide initially purified and lyophilized was placed into TFA/TIS/H₂O (95:2.5:2.5, 10 mL). Thirty minutes later, the solvent was evaporated under vacuum and the crude product was dissolved in Buffer A and lyophilized. Purification was performed using the RP-HPLC C5 column, with buffer A: 0.1% TFA aqueous solution, 10% acetonitrile and buffer B: 0.1% TFA aqueous solution, 80% acetonitrile.

[0536] With the above-mentioned method, fusion proteins were prepared on the basis of the

GLP-1 receptor binding polypeptide and the interleukin-1 receptor antagonistic protein, and their molecular weights were determined with mass spectrometry as follows:
G-9: the calculated molecular weight value thereof is 22177.0 and the molecular weight determined by mass spectrometry is 22179.5, which is consistent with the compound shown in the instant application;
G-12: the calculated molecular weight value thereof is 22465.2 and the molecular weight determined by mass spectrometry is 22467.1, which is consistent with the compound shown in the instant application;
G-14: the calculated molecular weight value thereof is 21258.0 and the molecular weight determined by mass spectrometry is 21259.6, which is consistent with the compound shown in the instant application;
G-15: the calculated molecular weight value thereof is 22135.9 and the molecular weight determined by mass spectrometry is 22137.3, which is consistent with the compound shown in the instant application;
G-17: the calculated molecular weight value thereof is 22423.1 and the molecular weight determined by mass spectrometry is 22424.7, which is consistent with the compound shown in the instant application;
G-25: the calculated molecular weight value thereof is 21319.0 and the molecular weight determined by mass spectrometry is 21320.4, which is consistent with the compound shown in the instant application;
G-27: the calculated molecular weight value thereof is 21634.3 and the molecular weight determined by mass spectrometry is 21636.0, which is consistent with the compound shown in the instant application;
G-29: the calculated molecular weight value thereof is 22439.2 and the molecular weight determined by mass spectrometry is 22441.1, which is consistent with the compound shown in the instant application.

[0537] With the above-mentioned method, fusion proteins were prepared on the basis of the insulin receptor binding polypeptide and the interleukin-1 receptor antagonistic protein, and their molecular weights were determined with mass spectrometry as follows:

IN-25: the calculated molecular weight value thereof is 25096.3 and the molecular weight determined by mass spectrometry is 25097.5, which is consistent with the compound shown in the instant application.

### Preparation of

[0538] I—CH₂—CONH—(CH₂CH₂O)₂—(CH₂)₂—NH—(N^{α}- tBuOOC(CH₂)₁₄CO)-γ-Glu-OtBu)

[0539] Ethyl Tert-butyl-N-[2-[2-(2-aminoethoxyl)ethoxy]ethyl]carbamate (2.48 g, 10 mM), 2-iodoacetic acid (2.05 g, 1 1 mM), EDC (1.72 g, 11 mM), and HOBT (1.49 g, 11 mM) were dissolved in anhydrous DMF and reacted at room temperature overnight. The reaction product was washed successively with 10% of hydrogen chloride aqueous solution, water, the saturated sodium hydrogen carbonate, water, and the saturated saline, dried, concentrated under a reduced pressure, and purified with a silica gel column, yielding tert-butyl-N-[2-[2-[2-[(2-iodoacetyl)amino]ethoxy]ethoxy]ethyl]carbamate.

[0540] Tert-butyl-N-[2-[2-[2-[(2-iodoacetyl)amino]ethoxy]ethoxy]ethyl]carbamate was dissolved in 4NHCl/dioxane, stirred at room temperature for 1 h, and the solvent was evaporated under a reduced pressure to yield N-[2-[2-(2-aminoethoxyl)ethoxy]ethyl]-2-iodo-ethylamide hydrochloride which can be used directly in the next reaction. N-[2-[2-(2-aminoethoxyl)ethoxy]ethyl]-2-iodo-ethylamide hydrochloride (1 g, 2.8 mM) was dissolved in 100 mM Na₂CO₃ (1 mL, pH 8) and acetonitrile (2 mL) at room temperature. Tert-butyl hexadecandioyl-L-Glu (OSu)-OtBu (1.42 g, 2.5 mM) was dissolved in acetonitrile (4 mL), stirred for 30 min, acidified with 50% acetic acid, and loaded onto a RP-HPLC C5 column for purification, yielding the final product, tert-butyl-16-[[1-(tert-butoxy)carbonyl-4-[2-[2-[2-[(2-iodoacetyl)amino]ethoxy]ethoxy]ethylamino]-4-oxo-butyl]amino]-16-oxo-palmitate. The calculated molecular weight is 825.4, and the determined molecular weight: 826.9.

[0541] I—CH₂—CONH—(CH₂CH₂O)₄—(CH₂)₂—NH—(N^{α}-(tBuOOC(CH₂)₁₆CO)-γ-Glu-OtBu) was prepared by a similar procedure.

### Acylation of the Protein/Polypeptide (4)

[0542] The fusion protein and the equimolar amount of I—CH₂—CONH—(CH₂CH₂O)₂—(CH₂)₂—NH—(N^{α}—(HOOCCH₂)₁₄CO)-γ-Glu-OtBu) were dissolved in 50 mM Tris.HCl, 5 mM EDTA, pH 8.0 and reacted at room temperature in the dark for 90 minutes. Purification by HPLC. Buffer A: 0.1% TFA aqueous solution, 10% acetonitrile; buffer B: 0.1% TFA aqueous solution, 80% acetonitrile. The polypeptide initially purified and lyophilized was placed into TFA/TIS/H₂O (95:2.5:2.5, 10 mL). Thirty minutes later, the solvent was evaporated under vacuum and the crude product was dissolved in Buffer A and lyophilized. Purification was performed using the RP-HPLC C5 column, with buffer A: 0.1% TFA aqueous solution, 10% acetonitrile and buffer B: 0.1% TFA aqueous solution, 80% acetonitrile.

[0543] With the above-mentioned method, fusion proteins were prepared on the basis of the GLP-1 receptor binding polypeptide and the interleukin-1 receptor antagonistic protein, and their molecular weights were determined with mass spectrometry as follows:

G-32: the calculated molecular weight value thereof is 22512.3 and the molecular weight determined by mass spectrometry is 22513.4, which is consistent with the compound shown in the instant application;
G-33: the calculated molecular weight value thereof is 22471.3 and the molecular weight determined by mass spectrometry is 22473.1, which is consistent with the compound shown in the instant application;
G-34: the calculated molecular weight value thereof is 22443.2 and the molecular weight determined by mass spectrometry is 22445.0, which is consistent with the compound shown in the instant application;
G-35: the calculated molecular weight value thereof is 22512.3 and the molecular weight determined by mass spectrometry is 22513.2, which is consistent with the compound shown in the instant application;
G-37: the calculated molecular weight value thereof is 22485.3 and the molecular weight determined by mass spectrometry is 22487.1, which is consistent with the compound shown in the instant application;
G-39: the calculated molecular weight value thereof is 22628.3 and the molecular weight determined by mass spectrometry is 22630.6, which is consistent with the compound shown in the instant application;
G-41: the calculated molecular weight value thereof is 21768.5 and the molecular weight determined by mass spectrometry is 21770.4, which is consistent with the compound shown in the instant application;
G-43: the calculated molecular weight value thereof is 21640.3 and the molecular weight determined by mass spectrometry is 21642.7, which is consistent with the compound shown in the instant application;
G-44: the calculated molecular weight value thereof is 21582.3 and the molecular weight determined by mass spectrometry is 21583.9, which is consistent with the compound shown in the instant application;
G-45: the calculated molecular weight value thereof is 21798.5 and the molecular weight determined by mass spectrometry is 21800.4, which is consistent with the compound shown in the instant application;
G-46: the calculated molecular weight value thereof is 21611.3 and the molecular weight determined by mass spectrometry is 21612.9, which is consistent with the compound shown in the instant application;
G-47: the calculated molecular weight value thereof is 21640.3 and the molecular weight determined by mass spectrometry is 21642.2, which is consistent with the compound shown in the instant application;
G-48: the calculated molecular weight value thereof is 21785.5 and the molecular weight determined by mass spectrometry is 21787.6, which is consistent with the compound shown in the instant application;
G-50: the calculated molecular weight value thereof is 21681.4 and the molecular weight determined by mass spectrometry is 21682.8, which is consistent with the compound shown in the instant application.

[0544] With the above-mentioned method, fusion proteins were prepared on the basis of the insulin receptor binding polypeptide and the interleukin-1 receptor antagonistic protein, and their molecular weights were determined with mass spectrometry as follows:

IN-26: the calculated molecular weight value thereof is 25089.4 and the molecular weight determined by mass spectrometry is 25091.6, which is consistent with the compound shown in the instant application.

### Modification of the Polypeptide by Polyethylene Glycol (PEGylation):

[0545] 1. The Amino Group (at the N-Terminus of the Main Chain or on the Side Chain of a Lysine)

[0546] a) Reductive Alkylation

[0547] The fusion protein, mPEG20K-CHO, sodium cyanoborohydride (NaBH₃CN) in a ratio of 1:2:45 were dissolved in a solution of acetic acid, pH 4.3 (0.1 M NaCl, 0.2 M CH₃COOH, 0.1 M Na₂CO₃). Protein concentration is 0.5-1 mg/mL. The reaction was monitored and purified by HPLC. Yield is about 55%. Polyethylene glycol can be selectively attached at the N-terminus of the polypeptide through reductive alkylation.

[0548] b) Acylation of NHS ester (N-hydroxyl succinimide)

[0549] The fusion protein and mPEG20K-NHS in a molar ratio of 1:1 was dissolved in a solution of 0.1 NN,N-Bis(2-hydroxyethyl) glycine (pH 8), with the protein concentration of 0.5 mg/mL. The reaction was run at room temperature for 2 hours and subjected to HPLC purification. Yield is approximately 90%.

[0550] 2. Mercapto group (cysteine)
[0551] a) PEG-maleimide

[0552] The fusion protein and the equimolar amount of mPEG20K-maleimide were dissolved in PBS (NaCl 150 mM, phosphate 20 mM, pH 7.5) with a protein concentration of 3 mg/ml. The reaction was run at room temperature for 1 h and subjected to HPLC purification. Yield is approximately 90%.
[0553] b) PEG-iodoethylamide

[0554] The fusion protein (3 mg/ml) and PEG-iodoethylamide (1.5 equivalent) were dissolved in 50 mM Tris.HCl, 5 mM EDTA, pH 8.0 and reacted at room temperature in the dark for 90 minutes. The unreacted PEG reagent was removed by a D-Salt™ Dextran desalting column and the resultant was purified by HPLC.

[0555] With the above-mentioned method, fusion proteins were prepared on the basis of the GLP-1 receptor binding polypeptide—the interleukin-1 receptor antagonistic protein-PEG, and their molecular weights were determined with mass spectrometry as follows:

[0556] G-10: the calculated molecular weight value thereof is 41584.2 and a wide peak with an intermediate molecular weight of 41590.4 is determined by mass spectrometry, which is consistent with the compound shown in the instant application;

[0557] G-11: the calculated molecular weight value thereof is 41091.7 and a wide peak with an intermediate molecular weight of 41097.1 is determined by mass spectrometry, which is consistent with the compound shown in the instant application;

[0558] G-13: the calculated molecular weight value thereof is 40719.3 and a wide peak with an intermediate molecular weight of 40713.6 is determined by mass spectrometry, which is consistent with the compound shown in the instant application;

[0559] G-16: the calculated molecular weight value thereof is 41926.5 and a wide peak with an intermediate molecular weight of 41931.3 is determined by mass spectrometry, which is consistent with the compound shown in the instant application;

[0560] G-23: the calculated molecular weight value thereof is 40522.1 and a wide peak with an intermediate molecular weight of 40530.2 is determined by mass spectrometry, which is consistent with the compound shown in the instant application;

[0561] G-24: the calculated molecular weight value thereof is 40780.3 and a wide peak with an intermediate molecular weight of 40786.1 is determined by mass spectrometry, which is consistent with the compound shown in the instant application;

[0562] G-26: the calculated molecular weight value thereof is 41095.6 and a wide peak with an intermediate molecular weight of 41100.5 is determined by mass spectrometry, which is consistent with the compound shown in the instant application;

[0563] G-28: the calculated molecular weight value thereof is 41410.9 and a wide peak with an intermediate molecular weight of 41413.4 is determined by mass spectrometry, which is consistent with the compound shown in the instant application.

[0564] With the above-mentioned method, fusion proteins were prepared on the basis of the insulin receptor binding polypeptide—the interleukin-1 receptor antagonistic protein-PEG, and their molecular weights were determined with mass spectrometry as follows:

[0565] IN-27: the calculated molecular weight value thereof is 43939.9 and a wide peak with an intermediate molecular weight of 43947.8 is determined by mass spectrometry, which is consistent with the compound shown in the instant application.

[0566] G-52 synthesis

[0567] The IL-1ra and the equimolar amount of maleimide-PEG 11-maleimide were dissolved in PBS with the polypeptide concentration of 5 mM. The reaction was run at room temperature for 1 h, and then the equimolar amount of HGEGTFTSDLSKQMEEEAVRLFIEWLKNGGPSSGA PPPC (SEQ ID NO: 185) was added. Two hours later, the reaction product was purified by HPLC with buffer A: 0.1% TFA aqueous solution, 10% acetonitrile and buffer B: 0.1% TFA aqueous solution, 80% acetonitrile. The calculated molecular weight value of the compound is 22176.9 and the molecular weight determined by mass spectrometry is 22186.7, with the sequencing result consistent with the sequence shown in the instant application.

[0568] With the above-mentioned method, fusion proteins were prepared on the basis of the GLP-1 receptor binding polypeptide-PEG—the interleukin-1 receptor antagonistic protein, and their molecular weights were determined with mass spectrometry as follows:

G-51: the calculated molecular weight value thereof is 22149.9 and the molecular weight determined by mass spectrometry is 22151.4, which is consistent with the compound shown in the instant application;
G-53: the calculated molecular weight value thereof is 21406.1 and the molecular weight determined by mass spectrometry is 21408.3, which is consistent with the compound shown in the instant application;
G-54: the calculated molecular weight value thereof is 21433.1 and the molecular weight determined by mass spectrometry is 21434.6, which is consistent with the compound shown in the instant application;
G-55: the calculated molecular weight value thereof is 21335.0 and the molecular weight determined by mass spectrometry is 21335.8, which is the compound shown in the instant application;
G-56: the calculated molecular weight value thereof is 21362.0 and the molecular weight determined by mass spectrometry is 21364.5, which is consistent with the compound shown in the instant application;
G-57: the calculated molecular weight value thereof is 22108.8 and the molecular weight determined by mass spectrometry is 22110.2, which is consistent with the compound shown in the instant application;
G-58: the calculated molecular weight value thereof is 22135.8 and the molecular weight determined by mass spectrometry is 22137.0, which is consistent with the compound shown in the instant application;
G-59: the calculated molecular weight value thereof is 41303.0 and a wide peak with an intermediate molecular weight of 41324.5 is determined by mass spectrometry, which is consistent with the compound shown in the instant application;
G-60: the calculated molecular weight value thereof is 41330.0 and a wide peak with an intermediate molecular weight of 41337.9 is determined by mass spectrometry, which is consistent with the compound shown in the instant application;
G-61: the calculated molecular weight value thereof is 40515.2 and a wide peak with an intermediate molecular weight of 40522.4 is determined by mass spectrometry, which is consistent with the compound shown in the instant application;
G-62: the calculated molecular weight value thereof is 40586.2 and a wide peak with an intermediate molecular weight of 40581.3 is determined by mass spectrometry, which is the compound shown in the instant application;
G-63: the calculated molecular weight value thereof is 40488.1 and a wide peak with an intermediate molecular weight of 40478.2 is determined by mass spectrometry, which is consistent with the compound shown in the instant application;
G-64: the calculated molecular weight value thereof is 40471.0 and a wide peak with an intermediate molecular weight of 40485.6 is determined by mass spectrometry, which is consistent with the compound shown in the instant application;
G-65: the calculated molecular weight value thereof is 41261.9 and a wide peak with an intermediate molecular weight of 41273.4 is determined by mass spectrometry, which is consistent with the compound shown in the instant application;
G-66: the calculated molecular weight value thereof is 41288.9 and a wide peak with an intermediate molecular weight of 41295.7 is determined by mass spectrometry, which is consistent with the compound shown in the instant application;
G-67: the calculated molecular weight value thereof is 41417.1 and a wide peak with an intermediate molecular weight of 41426.8 is determined by mass spectrometry, which is consistent with the compound shown in the instant application;
G-70: the calculated molecular weight value thereof is 40629.3 and a wide peak with an intermediate molecular weight of 40640.4 is determined by mass spectrometry, which is the compound shown in the instant application;
G-71: the calculated molecular weight value thereof is 21434.1 and the molecular weight determined by mass spectrometry is 21435.7, which is consistent with the compound shown in the instant application;
G-72: the calculated molecular weight value thereof is 21461.1 and the molecular weight determined by mass spectrometry is 21463.0, which is consistent with the compound shown in the instant application;
G-73: the calculated molecular weight value thereof is 21362.1 and the molecular weight determined by mass spectrometry is 21363.2, which is consistent with the compound shown in the instant application;
G-74: the calculated molecular weight value thereof is 21389.1 and the molecular weight determined by mass spectrometry is 21391.5, which is consistent with the compound shown in the instant application;
G-75: the calculated molecular weight value thereof is 21290.9 and the molecular weight determined by mass spectrometry is 21292.3, which is consistent with the compound shown in the instant application;
G-76: the calculated molecular weight value thereof is 21317.9 and the molecular weight determined by mass spectrometry is 21319.1, which is consistent with the compound shown in the instant application;
G-77: the calculated molecular weight value thereof is 21290.9 and the molecular weight determined by mass spectrometry is 21292.6, which is consistent with the compound shown in the instant application;
G-78: the calculated molecular weight value thereof is 21317.9 and the molecular weight determined by mass spectrometry is 21319.5, which is consistent with the compound shown in the instant application;
G-79: the calculated molecular weight value thereof is 21773.7 and the molecular weight determined by mass spectrometry is 21775.2, which is consistent with the compound shown in the instant application;
G-80: the calculated molecular weight value thereof is 21800.7 and the molecular weight determined by mass spectrometry is 21801.8, which is consistent with the compound shown in the instant application.

[0569] Synthesis of G-68

[0570] IL-1ra was dissolved in sodium phosphate to 1 mg/ml and the pH was adjusted to 5.0.2-fold equivalents of mPEG20K-CHO (whose structure is CH₃O—(CH₂CH₂O)ₙ—(CH₂)₂-CHO) was added, 45-fold equivalents of sodium cyanoborohydride was added to the concentration of 1 mM. The mixture was allowed to react at 4° C. for 12 hrs and purified by HPLC. The PEG20K IL-1ra and the equimolar amount of maleimide-PEG11-maleimide were dissolved in PBS with the polypeptide concentration of 5 mM. The reaction was run at room temperature for 1 h, and then the equimolar amount of HGEGTFTSDL SKQMEE EAVRLFIEWLKNGGPSSGAPPPC (SEQ ID NO: 185) was added. Two hours later, the reaction product was purified by HPLC with buffer A: 0.1% TFA aqueous solution, 10% acetonitrile and buffer B: 0.1% TFA aqueous solution, 80% acetonitrile. The calculated molecular weight value of the compound is 42176.9 and a wide peak with an intermediate molecular weight of 42193.4 is determined by mass spectrometry, which is consistent with the compound shown in the instant application;

[0571] G-69 was prepared in the same procedure.

[0572] G-69: the calculated molecular weight value thereof is 41406.1 and a wide peak with an intermediate molecular weight of 41424.5 is determined by mass spectrometry, which is consistent with the compound shown in the instant application.

[0573] With the above-mentioned method, fusion proteins were prepared on the basis of the GIP receptor binding polypeptide-PEG—the interleukin-1 receptor antagonistic protein, and their molecular weights were determined with mass spectrometry as follows:

[0574] GI-24: the calculated molecular weight value thereof is 23078.0 and the molecular weight determined by mass spectrometry is 23082.4, which is consistent with the compound shown in the instant application;

[0575] GI-25: the calculated molecular weight value thereof is 62255.1 and a wide peak with an intermediate molecular weight of 62283.5 is determined by mass spectrometry, which is consistent with the compound shown in the instant application;

[0576] GI-26: the calculated molecular weight value thereof is 62181.1 and a wide peak with an intermediate molecular weight of 62217.0 is determined by mass spectrometry, which is consistent with the compound shown in the instant application;

[0577] GI-27: the calculated molecular weight value thereof is 21712.5 and the molecular weight determined by mass spectrometry is 21714.6, which is consistent with the compound shown in the instant application;

[0578] GI-28: the calculated molecular weight value thereof is 23206.2 and the molecular weight determined by mass spectrometry is 23210.8, which is consistent with the compound shown in the instant application;

[0579] GI-29: the calculated molecular weight value thereof is 61598.4 and a wide peak with an intermediate molecular weight of 61567.3 is determined by mass spectrometry, which is consistent with the compound shown in the instant application;

[0580] GI-30: the calculated molecular weight value thereof is 21086.8 and the molecular weight determined by mass spectrometry is 21089.1, which is consistent with the compound shown in the instant application.

[0581] Synthesis of the Double Chain Insulin Receptor Binding Polypeptide

[0582] The document method (Han, et al., “Insulin chemical synthesis using a two-step orthogonal formation of the three disulfides”, 21st American Peptide Society Symposium, 2009). The A chain and the B chain were synthesized by Fmoc or Boc chemistry synthesis. The cysteines at positions A7 and B7 were protected by a general protective group, while the mercapto groups on the side chains of the cysteines at positions A6, All, A20, and B19 were protected by Acm. After being cleaved from the resin, the synthesized A and B chains were converted into A-(SH)⁷ (S-Acm)^{6,11,20} and B-(SH)⁷ (S-Acm)¹⁹. The B chain was dissolved in DMF or DMSO, and an equimolar amount of 2,2′-dithio-bis(5-nitropyridine) was added. The reaction was monitored and purified by HPLC, yielding B-(S-Npys)⁷ (S-Acm)¹⁹. The equimolar amount of A-(SH)⁷ (S-Acm)^{6,12} and B-(S-Npys)⁷ (S-Acm)¹⁹ were dissolved in DMSO with a polypeptide concentration of 15 mg/mL. When an A7-B7 disulfide bond was formed, 80% acetic acid aqueous solution was added and the polypeptide concentration was diluted to 1 mg/ml. Then, 40-fold amount of I₂ was added. The reaction was stirred at room temperature for 1 hour and then the ascorbic acid aqueous solution was added to stop the reaction. The mixture was purified by HPLC, and the final product was verified by mass spectrometry.

[0583] Synthesis of IN-29

[0584] FVNQHLC_{[1]}GSHLVEALYLVC_{[2]}GERGFFYTPRTGKGSSSAAAPQTGIVEQC_{[3]}C_{[4]}TSIC_{[5]}SLYQLENYC_{[6]}N (SEQ ID NO:283) ([1] to [6] indicates the No. of the cysteines; 3 pairs of disulfide bonds are formed by six cysteines in the compound, the specific positions for the three pairs of disulfide bonds are: C_{[1]} and C_{[4]} forming a disulfide bond, C_{[2]} and C_{[6]} forming a disulfide bond, C_{[3]} and C_{[5]} forming a disulfide bond) (68 mg) was dissolved in NH₄HCO₃ (15 mL, pH 9), Mal-dPEG12-NHS (10 mg) was added and stirred at room temperature for 30 min. Then, IL-1Ra (175 mg) was added and the reaction was further stirred at room temperature for 1 h. The sample was purified by HPLC, with buffer A: 0.1% TFA aqueous solution, 10% acetonitrile and buffer B: 0.1% TFA aqueous solution, 80% acetonitrile. The calculated molecular weight value of the compound is 24737.9 and the molecular weight determined by mass spectrometry is 24739.6. The sequencing result is consistent with the sequence shown in the instant application.

[0585] Synthesis of A1, B29-diBoc-insulin

[0586] Human insulin (100 mg) was dissolved in water (1 mL), NaHCO₃ (0.3 mL), and DMF (3 mL). t-Boc-azide (6 mg) was added. The mixture was stirred at 40° C. for 3 hours and 50% acetic acid (0.35 mL) was added to stop the reaction. The unreacted t-Boc-azide was extracted with ethyl ether (2×15 mL). The aqueous layer was freeze-dried under vacuum. The crude product comprised the insulin mono-, bi-, and tri-substituted with Boc. The mixture was purified with a SP-Sephadex C-25 ion exchange column. The ion exchange column was firstly equilibrated with 1.5 M acetic acid containing 6 M urea, the elution rate for the polypeptide is a 48 mL/h, with a linear gradient of 0.04-0.4 M sodium chloride/1000 mL of 1.5 M acetic acid containing 6 M urea. Di-t-Boc insulin was purified further with a DEAE-Sephadex A-25 column. The chromatographic column was equilibrated previously with 0.01 M Tris buffer (pH 8.5) containing 7 M urea. The elution rate was 35 mL/h, with a gradient of 0.14-0.28 M sodium chloride/100 mL of Tris buffer. The calculated molecular weight value thereof is 6007.9 and the molecular weight determined by mass spectrometry is 6009.2. A small amount of the polypeptide was dissolved in 0.05M NH₄HCO₃/20% ACN and reduced with DTT for 10 min, following mass spectrometric analysis. A(G1-N^{α}-Boc): the calculated molecular weight value thereof is 2483.9 and the molecular weight determined by mass spectrometry is 2485.1.B (K29-N-^{ε}-Boc): the calculated molecular weight value thereof is 3530.1 and the molecular weight determined by mass spectrometry is 3532.5. After trypsin digestion, the calculated molecular weight value of the fragment not comprising Boc is 2487.9 and the molecular weight thereof determined by mass spectrometry is 2488.7; while the calculated molecular weight value of the fragment comprising Boc is 1060.2 and the molecular weight thereof determined by mass spectrometry is 1061.3. The amino group at the B1 in the A1, B29-di-Boc polypeptide can be attached to polyethylene glycol, an albumin, a fatty acid, etc. to form a long-lasting polypeptide.

[0587] Synthesis of IN-35

[0588] A1, B29-diBoc-insulin (60 mg) was dissolved in DMF (3 mL), then Mal-dPEG12-NHS (9 mg) and triethylamine (30 μL) were added. The reaction was stirred for 2 hours at room temperature. After the solvent was evaporated under a reduced pressure, the crude product was dissolved in H₂O/CAN (3:1) and purified by RP-HPLC. The calculated molecular weight value thereof is 6758.8 and the molecular weight determined by mass spectrometry is 6760.4. The maleimide-diBoc-insulin was dissolved in purified water, with a polypeptide concentration of 10 mM. IL-1Ra (172 mg) was added and incubated at 37° C. for 30 min. Then, the resultant solution was diluted with a solution of 20 mM sodium phosphate containing 5 mM sodium octanoate and 750 mM ammonium sulphate. The unreacted reagents were removed by gel filtration chromatography, using 0.05 M ammonium bicarbonate aqueous solution as the elution solution. The pure product was obtained after freeze-dry in vacuum. The calculated molecular weight value of the obtained compound is 23884.2 and the molecular weight determined by mass spectrometry is 23886.7. The compound was assayed to be Di-Boc IN-35. Di-Boc IN-35 was dissolved in TFA/TIS (95:5) (3 mL) and stirred at room temperature for 15 min, the solvent was removed under a reduced pressure, and the crude product was purified by RP-HPLC with buffer A: 0.1% TFA aqueous solution, 10% acetonitrile and buffer B: 0.1% TFA aqueous solution, 80% acetonitrile. The calculated molecular weight value of the final compound is 23684.9 and the molecular weight determined by mass spectrometry is 23887.5, and was assayed to be IN-35.

[0589] With the above-mentioned method, fusion proteins were prepared on the basis of the insulin receptor binding polypeptide—the interleukin-1 receptor antagonistic protein -PEG, and their molecular weights were determined with mass spectrometry as follows:

IN-30: the calculated molecular weight value thereof is 24710.9 and the molecular weight determined by mass spectrometry is 24712.3, which is consistent with the compound shown in the instant application;
IN-31: the calculated molecular weight value thereof is 43987.1 and a wide peak with an intermediate molecular weight of 43993.5 is determined by mass spectrometry, which is consistent with the compound shown in the instant application;
IN-32: the calculated molecular weight value thereof is 43960.1 and a wide peak with an intermediate molecular weight of 43972.6 is determined by mass spectrometry, which is consistent with the compound shown in the instant application;
IN-35: the calculated molecular weight value thereof is 23684.9 and the molecular weight determined by mass spectrometry is 23685.2, which is consistent with the compound shown in the instant application;
IN-36: the calculated molecular weight value thereof is 23981.3 and the molecular weight determined by mass spectrometry is 23983.4, which is consistent with the compound shown in the instant application;
IN-37: the calculated molecular weight value thereof is 42934.1 and a wide peak with an intermediate molecular weight of 42945.8 is determined by mass spectrometry, which is consistent with the compound shown in the instant application;
IN-38: the calculated molecular weight value thereof is 23657.9 and the molecular weight determined by mass spectrometry is 23659.0, which is consistent with the compound shown in the instant application;
IN-39: the calculated molecular weight value thereof is 42907.1 and a wide peak with an intermediate molecular weight of 42915.6 is determined by mass spectrometry, which is consistent with the compound shown in the instant application;
IN-40: the calculated molecular weight value thereof is 23954.3 and the molecular weight determined by mass spectrometry is 23957.1, which is consistent with the compound shown in the instant application;
IN-41: the calculated molecular weight value thereof is 23583.8 and the molecular weight determined by mass spectrometry is 23585.6, which is consistent with the compound shown in the instant application;
IN-42: the calculated molecular weight value thereof is 42833.0 and a wide peak with an intermediate molecular weight of 42834.4 is determined by mass spectrometry, which is consistent with the compound shown in the instant application;
IN-43: the calculated molecular weight value thereof is 23556.8 and the molecular weight determined by mass spectrometry is 23559.2, which is consistent with the compound shown in the instant application;
IN-44: the calculated molecular weight value thereof is 42806.0 and a wide peak with an intermediate molecular weight of 42812.5 is determined by mass spectrometry, which is consistent with the compound shown in the instant application;
IN-45: the calculated molecular weight value thereof is 24825.0 and the molecular weight determined by mass spectrometry is 24826.8, which is consistent with the compound shown in the instant application;
IN-46: the calculated molecular weight value thereof is 44074.2 and a wide peak with an intermediate molecular weight of 44083.1 is determined by mass spectrometry, which is consistent with the compound shown in the instant application;
IN-47: the calculated molecular weight value thereof is 24798.0 and the molecular weight determined by mass spectrometry is 24799.3, which is consistent with the compound shown in the instant application;
IN-48: the calculated molecular weight value thereof is 44047.2 and a wide peak with an intermediate molecular weight of 44056.9 is determined by mass spectrometry, which is consistent with the compound shown in the instant application;
IN-49: the calculated molecular weight value thereof is 24783.9 and the molecular weight determined by mass spectrometry is 24785.7, which is consistent with the compound shown in the instant application;
IN-50: the calculated molecular weight value thereof is 44033.1 and a wide peak with an intermediate molecular weight of 44026.3 is determined by mass spectrometry, which is consistent with the compound shown in the instant application;
IN-51: the calculated molecular weight value thereof is 24825.0 and the molecular weight determined by mass spectrometry is 24827.5, which is consistent with the compound shown in the instant application;
IN-52: the calculated molecular weight value thereof is 44074.2 and a wide peak with an intermediate molecular weight of 44081.6 is determined by mass spectrometry, which is consistent with the compound shown in the instant application;
IN-53: the calculated molecular weight value thereof is 24841.0 and the molecular weight determined by mass spectrometry is 24843.1, which is consistent with the compound shown in the instant application;
IN-54: the calculated molecular weight value thereof is 44090.2 and a wide peak with an intermediate molecular weight of 44098.0 is determined by mass spectrometry, which is consistent with the compound shown in the instant application;
IN-55: the calculated molecular weight value thereof is 24135.3 and the molecular weight determined by mass spectrometry is 24139.2, which is consistent with the compound shown in the instant application;
IN-56: the calculated molecular weight value thereof is 24108.3 and the molecular weight determined by mass spectrometry is 24117.5, which is consistent with the compound shown in the instant application;
IN-57: the calculated molecular weight value thereof is 23772.0 and the molecular weight determined by mass spectrometry is 23773.9, which is consistent with the compound shown in the instant application;
IN-58: the calculated molecular weight value thereof is 24068.4 and the molecular weight determined by mass spectrometry is 24070.7, which is consistent with the compound shown in the instant application;
IN-59: the calculated molecular weight value thereof is 23670.9 and the molecular weight determined by mass spectrometry is 23672.8, which is consistent with the compound shown in the instant application;
IN-60: the calculated molecular weight value thereof is 23903.2 and the molecular weight determined by mass spectrometry is 23891.3, which is consistent with the compound shown in the instant application;
IN-61: the calculated molecular weight value thereof is 23802.1, and the molecular weight determined by mass spectrum is 23812.6, which is consistent with the compound shown in the instant application.

[0590] Receptor Competitive Binding Assay

[0591] 1. Receptor Binding Assay for IL-1Ra

[0592] Reference was made to “Interleukin-1 receptor antagonist activity of a human interleukin-1 inhibitor”, Hannum et al, Nature 343, 336-340). Briefly, a standard amount of ³⁵S-labeled IL-1Ra with a specific activity of 4000 Ci/mmol was added to a 96-well plate to reach a final concentration which approximately equals to its K_{d} (150 pM). Murine EL4 thymoma cells (ATCC, TIB181, about 5000 receptors per cell) or Chinese hamster ovary (CHO)-derived cells expressing human IL-1 receptor (about 30,000 receptors per cell) and the fusion protein of different concentrations (diluted in series from 20 mM to 20 pM) were cultured at 4° C. for 4 hours. The cells were harvested through a Millipore millititer plate filter system, and radioactivity retained on the filter membrane was counted by an Ambis radioanalytical imaging system. Percentage of wild type activity was defined as IC₅₀ (wild type)/IC₅₀ (fusion protein). The K_{d} for wild type IL-1ra was estimated using a simplification mode of the Cheng-Prusoff relationship (K_{d}=IC₅₀/2) and ranged from 150 to 400 pM, consistent with the values previously reported in publications.

[0593] 2. Receptor Binding Assay for Insulin

[0594] (1) Preparation of 1²⁵I-insulin

[0595] According to the document method (Cresto, et al., “Preparation of biologically active mono-¹²⁵I-insulin of high specific activity.” Acta Physiol Lat Am. 1981, 31(1):13-24)

[0596] (2) Receptor Binding Assay for the Compound

[0597] According to the document method (E. K. Frandsen and R. A. Bacchus. “New, simple insulin-receptor assay with universal application to solubilized insulin receptors and receptors in broken and intact cells.” Diabetes, 1987, 36, 3:335-340) or one of the following methods. Unless otherwise stated, the method of preparing receptor was the same as the literature method, using human placenta membrane. Typically, 0.025 mg of placenta membrane was used in insulin receptor binding assay.

[0598] In the insulin receptor binding assay, the starting standard concentrations of both the insulin and the fusion proteins of the present invention were 100 nM, and the insulin and the fusion proteins were 3-fold diluted serially, resulting in the solutions with seven different concentrations (100 nM, 33.33 nM, 11.11 nM, 3.70 nM, 1.23 nM, 0.41 nM, 0.13 nM, and 0.04 nM). For the fusion proteins having an activity for the insulin receptor lower than 10% of human insulin standard, the starting concentration of the proteins was 500 nM.

[0599] Truncated Water-Soluble Receptors

[0600] Insulin receptor, ¹²⁵I-insulin (3 pM) and a series of fusion proteins diluted 3-fold were added toa buffer [100 mM Hepes, pH 8.0, 100 mM NaCl, 10 mM MgCl₂, 0.5% (w/v) BSA, 0.025% (w/v) Triton X-100] to reach a total volume of 200 μL, incubated for 48h at 4° C. Subsequently, the receptor and fusion proteins and ligand bound to the receptor were precipitated with 0.2% γ-globulin and 500 μL of 25% (w/v) PEG 8000, and the radioactivity in the precipitate was determined. The concentration of the receptor was adjusted to a concentration at which 15-20% of receptor binds to the ligand when no fusion proteins was added.

[0601] Membrane-Bound Receptors

[0602] Membrane-bound receptors used in receptor binding assays were from BHK cells overexpressing full-length insulin receptors. Equal number of transfected BHK cells (2000-5000) was evenly seeded in each well of a 96-well plate and grown for 24 h in Dulbecco's modified Eagle's medium (DMEM) containing 10% (v/v) fetal bovine serum before performing the receptor binding assay. Cells were firstly washed once with binding buffer (DMEM containing 0.50% BSA, 20 mM Hepes, pH 7.8), then ¹²⁵I-insulin (6.5 pM) and a series of fusion proteins diluted 3-foldin binding buffer were added. Cultured for 3 h at 16° C. and unbound polypeptides were sucked out using a sucker, and washed once with 1.2 ml of binding buffer. Cells were solubilized in 500 μl of 1% (w/v) SDS, 100 mM NaCl, 25 mM Hepes (pH 7.8) and detected. The number of cells was adjusted to a number of which 16-28% of receptor binds to the ligand when no fusion proteins was added.

[0603] Insulin Receptor: ¹²⁵I-Insulin (30 nCi), a series of fusion proteins diluted 3-fold and placental membranes (0.025 mg) were incubated in 0.05 ml of buffer described above for 1 h at 20° C. Samples were filtered with EHWP filters, and the incubation tubes and filters were washed four times with 2.5 ml of cold buffer free of bovine albumin. Less than 5% of the fusion proteins were attached to the filters in the absence of placental membranes. Nonspecific binding of ligand to placental membranes was measured by adding excess amount of non-iodonation insulin (1 μM) to the incubation mixture. Nonspecific binding usually accounts for less of 1% of the total binding of ligand to placental membranes.

[0604] Specific binding percentage=(binding radioactivity-nonspecific binding radioactivity/total binding radioactivity-nonspecific binding radioactivity)×100. Total binding radioactivity is the total radioactivity detected before addition of fusion proteins and binding radioactivity is the radioactivity detected after addition of fusion proteins. IC₅₀ of fusion proteins was calculated using Origin software (OriginLab, Northampton, Mass.). Activity of fusion protein relative to human insulin standard=IC₅₀ human insulin standard/IC₅₀ fusion protein.

[0605] 3. GLP-1cAMP Assay

[0606] BHK (baby hamster kidney) cells expressing the GLP-1 receptor of human pancreatic islet were prepared according to the literature (Knudsen and Pridal, 1996, Eur. J. Pharm. 318, 429-435). The plasma membrane was prepared according to the literature (Adelhorst, et al., 1994, J. Biol. Chem. 269, 6275), homogenized in a buffer (10 mmol/l Tris-HCl, 30 mmol/l NaCl, pH 7.4, 1 mmol DTT, 5 mg/l leupeptin, 5 mg/l pepstatin, 100 mg/l bacitracin, 16 mg/l aprotinin). The homogeneous mixture was centrifuged over a layer of 41 w/v % sucrose. The white zone between the upper and lower layers was dissolved in a buffer and centrifuged. The plasma membrane was stored at −80° C.

[0607] A 96-well microtiter plate was used in the analysis assay, with a total volume of 140 μl. The buffer contained 50 mmol/l Tris-HCl, pH 7.4, 1 mmol/l EGTA, 1.5 mmol/l MgSO₄, 1.7 mmol/l ATP, 20 mM GTP, 2 mmol/l, 3-isobutyl-1-methylxanthine, 0.01% Tween-20, 0.1% human serum albumin. The tested sample was dissolved and diluted with the buffer, and added to the membrane preparation. The mixture was incubated at 37° C. for 2 hours. The reaction was stopped by adding 25 μl of 0.05 mol/l HCl. After 10-fold diluted, the samples was measured with scintillation proximity assay (SPA) for cAMP. For references, see Kahl, et al., “Scintillation Proximity Assay.” February, 2005. DOI: 10.1002/0471142301.ns0715s30. http://www.currentprotocols.com/WileyCDA/CPUnit/refld-ns0715.html. EC₅₀ for the GLP-1 (7-37) standard was 61 pM.

[0608] 4. GIP cAMP Assay

[0609] The assay was done as described in the publication (Wheeler et al, “Characterization of the carboxyl-terminal domain of the rat glucose-dependent insulinotropic polypeptide (GIP) receptor: a role for serines 426 and 427 in internalization” J. Biol. Chem. 1999, 274: 24593-24601). CHO cells stably expressing GIP receptors were transferred to a 96-well microtiter plate, incubated for 48 hours. The cells were washed with a 37° C. analytic buffer buffered by HEPES (DMEM/F12, 15 mM HEPES (Sigma-Aldrich), 0.1% bovine albumin (Sigma-Aldrich), pH 7.4), pre-incubated for 60 minutes. The samples (0.001-100 nM fusion protein dissolved in 10 mM HEPES, pH 7.4, 150 mM NaCl, 5 mM KCl, 2.5 mM CaCl₂, 1.2 mM KH₂PO₄, 1.2 mM MgSO₄, 25 mM NaHCO₃, 0.5 mM3-isobutyl-1-methylxanthine, and 1%(w/v) bovine albumin) were added to the cells, and cultured for 30 minutes. For GIP receptor antagonists, cells were first incubated with the antagonists for 15 min, then 1 nM GIP(1-42) was added and cultured for 30 minutes. The amount of cAMP was measured with scintillation proximity assay.

[0610] 5. GIP Receptor Binding Assay

[0611] GIP (5 μg) was iodinated by the traditional chloramine-T method and purified with C-18 column (Sep-Pak; Millipore Corp.), the gradient of acetonitrile was 30-45%. Specific activity of radioactively labeled GIP ranged from 10 to 50 μCi/mg. ¹²⁵I-GIP was dissolved in analytical buffer with a concentration of 3×10⁵ cpm/100 μl. CHO cells expressing GIP receptors (1-5×10⁵/well) were washed twice with the binding buffer (DMEM/F12, 20 mm HEPES, 0.1% bovine albumin, 0.5 mg/ml bacitracin, pH 7.4). ¹²⁵I-GIP (50000 cpm) and 0.3-500 nM fusion protein were added, and incubated for 12-16h at 4° C. ¹²⁵I-GIP unbound to the receptor was separated in vacuum. The microtiter plate were washed with ice cold PBS containing 0.1% (w/v) bovine albumin and dried at room temperature. 30 μl Ultima Gold (Perkin-Elmer) could be added according to the actual conditions, ¹²⁵I-GIP content was measured by a gamma-ray counter. IC₅₀ calculation method is the same as that in the insulin receptor binding assay. IC₅₀ of GIP (1-42) standard was 2.1±0.75 nM.

[0612] Experimental Results:

[0613] The biological activity of the compounds of the present invention was detected by performing GLP-1 receptor binding capability, insulin receptor binding capability, GIP receptor binding capability, and interleukin-1 receptor binding capability assays on these compounds, using the human GLP-1 (7-37) as the reference for the GLP-1 receptor binding capacity (100%), the human insulin as the reference for the insulin receptor binding capacity (100%), the GIP (1-42) as the reference for the GIP receptor binding capacity (100%), and the wild-type human IL-1Ra as the reference for the interleukin-1 receptor antagonistic protein (100%). The obtained results were shown in Tables 1, 2, and 3, respectively.

TABLE 1
The biological activity of the fusion protein
of the GLP-1 receptor binding polypeptide and
the interleukin-1 receptor antagonistic protein

| | GLP-1 | I1-1ra |
|---|---|---|
| | receptor | receptor |
| No. | (%) | (%) |
| G-1 | 52 | 33 |
| G-2 | 53 | 40 |
| G-3 | 61 | 46 |
| G-4 | 67 | 45 |
| G-5 | 45 | 37 |
| G-6 | 49 | 48 |
| G-7 | 50 | 51 |
| G-8 | 48 | 53 |
| G-9 | 30 | 26 |
| G-10 | 29 | 30 |
| G-11 | 21 | 33 |
| G-12 | 22 | 34 |
| G-13 | 19 | 31 |
| G-14 | 20 | 32 |
| G-15 | 17 | 26 |
| G-16 | 25 | 33 |
| G-17 | 20 | 32 |
| G-18 | 42 | 31 |
| G-19 | 43 | 38 |
| G-20 | 55 | 46 |
| G-21 | 58 | 45 |
| G-22 | 60 | 47 |
| G-23 | 27 | 24 |
| G-24 | 32 | 27 |
| G-25 | 33 | 29 |
| G-26 | 26 | 30 |
| G-27 | 24 | 32 |
| G-28 | 23 | 35 |
| G-29 | 43 | 34 |
| G-30 | 57 | 42 |
| G-31 | 53 | 40 |
| G-32 | 62 | 41 |
| G-33 | 54 | 43 |
| G-34 | 46 | 42 |
| G-35 | 53 | 40 |
| G-36 | 60 | 44 |
| G-37 | 63 | 46 |
| G-38 | 61 | 43 |
| G-39 | 62 | 42 |
| G-40 | 51 | 45 |
| G-41 | 46 | 41 |
| G-42 | 45 | 42 |
| G-43 | 41 | 40 |
| G-44 | 40 | 40 |
| G-45 | 46 | 42 |
| G-46 | 45 | 43 |
| G-47 | 42 | 41 |
| G-48 | 42 | 40 |
| G-49 | 43 | 42 |
| G-50 | 44 | 43 |
| G-51 | 92 | 47 |
| G-52 | 90 | 46 |
| G-53 | 79 | 46 |
| G-54 | 78 | 47 |
| G-55 | 72 | 45 |
| G-56 | 70 | 44 |
| G-57 | 83 | 45 |
| G-58 | 82 | 43 |
| G-59 | 81 | 39 |
| G-60 | 80 | 37 |
| G-61 | 75 | 38 |
| G-62 | 73 | 36 |
| G-63 | 71 | 37 |
| G-64 | 70 | 34 |
| G-65 | 77 | 36 |
| G-66 | 76 | 35 |
| G-67 | 52 | 35 |
| G-68 | 51 | 33 |
| G-69 | 45 | 34 |
| G-70 | 42 | 32 |
| G-71 | 78 | 46 |
| G-72 | 77 | 47 |
| G-73 | 78 | 46 |
| G-74 | 76 | 45 |
| G-75 | 71 | 46 |
| G-76 | 70 | 43 |
| G-77 | 82 | 44 |
| G-78 | 81 | 42 |
| G-79 | 120 | 40 |
| G-80 | 115 | 39 |
| G-81 | 39 | 12 |
| G-82 | 7 | 12 |
| G-83 | 37 | 8 |
| G-84 | 15 | 9 |

TABLE 2
The biological activity of the fusion protein of
the insulin receptor binding polypeptide and the
interleukin-1 receptor antagonistic protein

| | Insulin | |
|---|---|---|
| | receptor | IL-1 |
| No. | (%) | receptor |
| IN-1 | 17 | 35 |
| IN-2 | 17 | 34 |
| IN-3 | 16 | 35 |
| IN-4 | 20 | 39 |
| IN-5 | 20 | 38 |
| IN-6 | 18 | 37 |
| IN-7 | 25 | 49 |
| IN-8 | 25 | 47 |
| IN-9 | 24 | 47 |
| IN-10 | 26 | 50 |
| IN-11 | 25 | 48 |
| IN-12 | 25 | 48 |
| IN-13 | 13 | 34 |
| IN-14 | 12 | 32 |
| IN-15 | 12 | 32 |
| IN-16 | 18 | 42 |
| IN-17 | 18 | 40 |
| IN-18 | 17 | 40 |
| IN-19 | 23 | 47 |
| IN-20 | 23 | 44 |
| IN-21 | 21 | 43 |
| IN-22 | 25 | 46 |
| IN-23 | 25 | 46 |
| IN-24 | 24 | 45 |
| IN-25 | 19 | 38 |
| IN-26 | 18 | 39 |
| IN-27 | 10 | 31 |
| IN-28 | 9 | 29 |
| IN-29 | 53 | 45 |
| IN-30 | 53 | 42 |
| IN-31 | 9 | 33 |
| IN-32 | 9 | 31 |
| IN-33 | 16 | 40 |
| IN-34 | 15 | 44 |
| IN-35 | 19 | 45 |
| IN-36 | 10 | 34 |
| IN-37 | 14 | 30 |
| IN-38 | 50 | 47 |
| IN-39 | 14 | 33 |
| IN-40 | 12 | 35 |
| IN-41 | 47 | 46 |
| IN-42 | 13 | 31 |
| IN-43 | 45 | 43 |
| IN-44 | 11 | 32 |
| IN-45 | 20 | 39 |
| IN-46 | 10 | 28 |
| IN-47 | 19 | 38 |
| IN-48 | 9 | 26 |
| IN-49 | 27 | 25 |
| IN-50 | 16 | 20 |
| IN-51 | 49 | 37 |
| IN-52 | 8 | 19 |
| IN-53 | 47 | 36 |
| IN-54 | 9 | 18 |
| IN-55 | 38 | 35 |
| IN-56 | 38 | 36 |
| IN-57 | 20 | 23 |
| IN-58 | 7 | 17 |
| IN-59 | 21 | 19 |
| IN-60 | 21 | 24 |
| IN-61 | 23 | 22 |
| IN-62 | 18 | 47 |
| IN-63 | 17 | 45 |
| IN-64 | 20 | 42 |
| IN-65 | 17 | 43 |
| IN-66 | 15 | 41 |
| IN-67 | 11 | 46 |
| IN-68 | 5 | 10 |
| IN-69 | 7 | 18 |
| IN-70 | 8 | 42 |

TABLE 3
The biological activity of the fusion protein of the GIP receptor binding
polypeptide and the interleukin-1 receptor antagonistic protein

| | GIP receptor | IL-1 receptor |
|---|---|---|
| No. | (%) | (%) |
| GI-1 | 53 | 46 |
| GI-2 | 264 | 47 |
| GI-3 | 298 | 44 |
| GI-4 | 312 | 45 |
| GI-5 | 316 | 42 |
| GI-6 | (50) | 48 |
| GI-7 | (53) | 45 |
| GI-8 | (55) | 43 |
| GI-9 | (55) | 40 |
| GI-10 | (6.2) | 42 |
| GI-11 | 187 | 38 |
| GI-12 | 179 | 41 |
| GI-13 | 356 | 39 |
| GI-14 | 368 | 40 |
| GI-15 | 381 | 45 |
| GI-16 | (57) | 43 |
| GI-17 | (61) | 47 |
| GI-18 | (72) | 46 |
| GI-19 | (54) | 50 |
| GI-20 | (65) | 48 |
| GI-21 | (63) | 45 |
| GI-22 | 36 | 21 |
| GI-23 | (28) | 19 |
| GI-24 | 137 | 50 |
| GI-25 | 24 | 18 |
| GI-26 | (19) | 23 |
| GI-27 | 42 | 67 |
| GI-28 | 79 | 51 |
| GI-29 | 156 | 24 |
| GI-30 | (49) | 58 |

Note:
The cAMP assay was used for analysis of GI-1 to GI-5, GI-11 to GI-15, GI-22, GI-24, GI-25, and GI-27 to GI-29 in the tables. The GIP receptor binding assay was used for analysis of other proteins, wherein the ratio of the activity of the proteins vs. GIP (1-42) in the GIP receptor binding assay was shown in the parenthesis. These proteins are inhibitors to the GIP receptor. Accordingly, the receptor binding assay was used instead of the cAMP assay.

### Animal Test

[0614] 1. The 5 week-old C57BL/6J mice was fed high-fat/high-sucrose feedstuff (in which 58% of calories came from fat, 26% from carbohydrate, and 16% from protein). The mice were assigned into four groups, six animals per group. The mice in Group 1 were intraperitoneally injected daily with the physiological saline (0.9% w/v, NaCl), the mice in Group 2 were injected daily with IL-1Ra (500 nmol/kg), and the mice in Groups 3 and 4 were injected daily with the fusion proteins G-2 and G-20 (50 nmol/kg), for 12 consecutive weeks, followed by a glucose tolerance test. The mice were first fasted for 12 hours and then intraperitoneally injected with glucose (2 mg/g). Blood was collected at 0, 15, 30, 60, 90, 120 min respectively and the blood glucose was measured. Furthermore, the levels of serum insulin were measured at 0 and 30 min respectively.

[0615] In the test shown in FIG. 7, better blood glucose control was demonstrated in the IL-1Ra group as compared with that in the physiological saline group. Furthermore, the glucose tolerance in the mice of G-2 and G-20 groups was markedly enhanced, with a low peak of blood glucose and a rapid decrease of the blood glucose level. During 12 weeks of treatment, dosages of the G-2 and G-20 were only 1/10 of the dosage of IL-1Ra, demonstrating that the fusion protein of the GLP-1 receptor binding polypeptide and the interleukin-1 receptor antagonistic protein has an in vivo biological activity and a therapeutic effect significantly superior to those of the IL-1Ra.

[0616] In the test shown in FIG. 8, the fasting serum insulin level in the IL-1Ra group was significantly lower than that in the physiological saline group. The insulin level in the physiological saline group varied minimally during the glucose tolerance test, while the insulin level in the IL-1Ra group was 2-fold higher than that of fasting period. The fasting serum insulin levels in the G-2 and G-20 groups were lowest, while the insulin levels during the glucose tolerance test were 2.5 to 4-fold higher than those of fasting period, suggested that the G-2 and G-20 have better regulation and protection on the function of pancreatic islet than IL-1Ra alone used. Better blood glucose control was demonstrated.

2. The 5 week-old C57BL/6J mice was fed high-fat/high-sucrose feedstuff (in which 58% of calories came from fat, 26% from carbohydrate, and 16% from protein). The mice were assigned into four groups, six animals per group. The mice in Group 1 (the control group) were intraperitoneally injected daily with the physiological saline (0.9% w/v, NaCl), the mice in Group 2 were injected daily with IL-1Ra (500 nmol/kg), and the mice in Groups 3 and 4 were injected daily with the fusion proteins IN-7 and IN-62 (30 nmol/kg) after a meal, for 12 consecutive weeks, followed by an insulin tolerance test. The mice were first fasted for 5 hours and then intraperitoneally injected with human insulin (0.75 U/kg). Blood was collected at 0, 15, 30, 60, 90, 120 min and the blood glucose was measured respectively.

[0617] The high-fat food often leads to hyperinsulinemia, resulting in a decreased sensitivity to the insulin, which is the etiologic cause in a substantial proportion of obese patients with type 2 diabetes. Increasing the insulin sensitivity is one of important methods to prevent or even treat diabetes. In the test shown in FIG. 9, better insulin sensitivity was demonstrated in the IL-1Ra group as compared with that in the physiological saline group. The insulin sensitivity of the mice in the IN-7 and IN-62 groups was more superior. During 12 weeks of treatment, dosages of the IN-7 and IN-62 were only 1/17 of the dosage of IL-1Ra, demonstrating that the fusion protein of the insulin receptor binding polypeptide and the interleukin-1 receptor antagonistic protein has an in vivo biological activity and a therapeutic effect significantly superior to those of the IL-1Ra.

3. The 5 week-old C57BL/6J mice was fed high-fat/high-sucrose feedstuff (in which 58% of calories came from fat, 26% from carbohydrate, and 16% from protein). The mice were assigned into four groups, six animals per group. The mice in Group 1 (the control group) were intraperitoneally injected daily with the physiological saline (0.9% w/v, NaCl), the mice in Group 2 were injected daily with IL-1Ra (500 nmol/kg), and the mice in Groups 3 and 4 were injected daily with the fusion proteins GI-3 and GI-7 (50 nmol/kg), for 12 consecutive weeks, followed by the glucose tolerance test. The mice were first fasted for 12 hours and then intraperitoneally injected with glucose (2 mg/g). Blood was collected at 0, 15, 30, 60 min and the blood glucose was measured respectively.

[0618] In the test shown in FIG. 10, better blood glucose control was demonstrated in the IL-1Ra group as compared with that in the control group with physiological saline. Furthermore, the glucose tolerance in the mice of GI-3 and GI-7 groups was markedly enhanced, with a low peak of blood glucose. During 12 weeks of treatment, dosages of the GI-3 and GI-7 were only 1/10 of the dosage of IL-1Ra, demonstrating that the fusion protein of the GIP receptor binding polypeptide and the interleukin-1 receptor antagonistic protein has an in vivo biological activity and a therapeutic effect significantly superior to those of the IL-1Ra.

[0619] While the fusion proteins in the above-mentioned tests were not certainly superior to the standard proteins (IL-1Ra, GLP (7-37), the human insulin, and GIP (1-42)) in the corresponding receptor-binding assays (Tables 1, 2, and 3), the fusion proteins exhibited in vivo more excellent biological activities and therapeutic effects through the synergism of the two constituent proteins/polypeptides, which verifies the correctness of methods of designing and preparing the fusion proteins in the present invention. The fusion proteins in the present invention are a promising class of novel compounds for prophylaxis and treatment of diabetes.

1. A fusion protein obtained by linking an interleukin-1 receptor antagonist protein or an analogue thereof with another polypeptide which is a GLP-1 receptor binding polypeptide or an analogue thereof, or an insulin receptor binding polypeptide or an analogue thereof, or a GIP receptor binding polypeptide or an analogue thereof;
the structure of said fusion protein is as follows: the interleukin-1 receptor antagonist protein or an analogue thereof -Lⱼ-another polypeptide, or another polypeptide-Lⱼ- the interleukin-1 receptor antagonist protein or an analogue thereof;
the sequence of said interleukin-1 receptor antagonist protein or an analogue thereof is
(SEQ ID NO: 204)
X_{IL0}RPSGRKSSKMQAFRIWDVNQKTFYLRNNQLVAGYLQGPNVNLEEK
IDVVPIEPHALFLGIHGGKMX_{IL66}LSX_{IL69}VKSGDETRLQLEAVX_{IL84}I
TDLSENRKQDKRFAFIRSDSGPTTSFESAAX_{IL116}PGWFLX_{IL122}TAME
ADQPVSLTNMPDEGVMVTKFYFQEDE,
wherein
X_{IL0} is a methionine, a cysteine, general formula 1, general formula 2, or absent;
X_{IL66}, X_{IL69}, X_{IL116}, X_{IL122} is a cysteine or serine; X_{IL84} is a cysteine or asparagine;
Lⱼ is a linking group or spacer group, including a long chain fatty acid, polyethylene glycol, an amino acid, a short peptide, a protein, or a long chain formed by linking one or more of the optional long chain fatty acids, polyethylene glycol, amino acids, short peptides, etc through a covalent bond, or any of the structures connecting two proteins/polypeptides through a covalent bond, or absent; preferably, said linking group or spacer group comprises one or more lysines or cysteines of which the amino or mercapto groups on the side chains are available for reacting with a modifying group; preferably, the general formula of said short peptide is a (GlyGlyGlyGlySer)ₙ (SEQ ID NO:436), wherein n is 0, 1, 2, 3, 4, 5, or 6;
preferably, the sequence of said interleukin-1 receptor antagonist protein or an analogue thereof is
(SEQ ID NO: 431)
U_{L}-
RPSGRKSSKMQAFRIWDVNQKTFYLRNNQLVAGYLQGPNVNLEEKIDVVPIEPHALFLGIHGGK
MX_{IL66}LSX_{IL69}VKSGDETRLQLEAVX_{IL84}ITDLSENRKQDKRFAFIRSDSGPTTSFESAAX_{IL116}P
GWFLX_{IL122}TAMEADQPVSLTNMPDEGVMVTKFYFQEDE;
or
(SEQ ID NO: 432)
U_{L}-
CRPSGRKSSKMQAFRIWDVNQKTFYLRNNQLVAGYLQGPNVNLEEKIDVVPIEPHALFLGIHGG
KMX_{IL66}LSX_{IL69}VKSGDETRLQLEAVNITDLSENRKQDKRFAFIRSDSGPTTSFESAASPGWFL
X_{IL122}TAMEADQPVSLINMPDEGVMVTKFYFQEDE;
(SEQ ID NO: 433)
U_{L}-
RPSGRKSSKMQAFRIWDVNQKTFYLRNNQLVAGYLQGPNVNLEEKIDVVPIEPHALFLGIHGGK
MX_{IL66}LSX_{IL69}VKSGDETRLQLEAVNITDLSENRKQDKRFAFIRSDSGPTTSFESAASPGWFL
X_{IL122}TAMEADQPVSLTNMPDEGVMVTKFYFQEDEC;
(SEQ ID NO: 219)
CRPSGRKSSKMQAFRIWDVNQKTFYLRNNQLVAGYLQGPNVNLEEKIDVVPIEPHALFL
GIHGGKMCLSCVKSGDETRLQLEAVNITDLSENRKQDKRFAFIRSDSGPTTSFESAASPGWFLC
TAMEADQPVSLTNMPDEGVMVTKFYFQEDE;
(SEQ ID NO: 220)
CRPSGRKSSKMQAFRIWDVNQKTFYLRNNQLVAGYLQGPNVNLEEKIDVVPIEPHALFL
GIHGGKMCLSCVKSGDETRLQLEAVNITDLSENRKQDKRFAFIRSDSGPTTSFESAACPGWFLC
TAMEADQPVSLTNMPDEGVMVTKFYFQEDE;
(SEQ ID NO: 221)
CRPSGRKSSKMQAFRIWDVNQKTFYLRNNQLVAGYLQGPNVNLEEKIDVVPIEPHALFL
GIHGGKMCLSCVKSGDETRLQLEAVCITDLSENRKQDKRFAFIRSDSGPTTSFESAASPGWFLC
TAMEADQPVSLTNMPDEGVMVTKFYFQEDE;
(SEQ ID NO: 222)
RPSGRKSSKMQAFRIWDVNQKTFYLRNNQLVAGYLQGPNVNLEEKIDVVPIEPHALFLG
IHGGKMCLSCVKSGDETRLQLEAVCITDLSENRKQDKRFAFIRSDSGPTTSFESAASPGWFLCT
AMEADQPVSLTNMPDEGVMVTKFYFQEDE;
(SEQ ID NO: 223)
RPSGRKSSKMQAFRIWDVNQKTFYLRNNQLVAGYLQGPNVNLEEKIDVVPIEPHALFLG
IHGGKMCLSCVKSGDETRLQLEAVCITDLSENRKQDKRFAFIRSDSGPTTSFESAACPGWFLCT
AMEADQPVSLTNMPDEGVMVTKFYFQEDE;
(SEQ ID NO: 224)
RPSGRCSSKMQAFRIWDVNQKTFYLRNNQLVAGYLQGPNVNLEEKIDVVPIEPHALFLG
IHGGKMCLSCVKSGDETRLQLEAVNITDLSENRKQDKRFAFIRSDSGPTTSFESAASPGWFLCT
AMEADQPVSLTNMPDEGVMVTKFYFQEDE;
(SEQ ID NO: 225)
RPSGRCSSKMQAFRIWDVNQKTFYLRNNQLVAGYLQGPNVNLEEKIDVVPIEPHALFLG
IHGGKMCLSCVKSGDETRLQLEAVNITDLSENRKQDKRFAFIRSDSGPTTSFESAACPGWFLCT
AMEADQPVSLTNMPDEGVMVTKFYFQEDE;
(SEQ ID NO: 226)
RPSGRKSCKMQAFRIWDVNQKTFYLRNNQLVAGYLQGPNVNLEEKIDVVPIEPHALFLG
IHGGKMCLSCVKSGDETRLQLEAVNITDLSENRKQDKRFAFIRSDSGPTTSFESAASPGWFLCT
AMEADQPVSLTNMPDEGVMVTKFYFQEDE;
(SEQ ID NO: 227)
RPSGRKSCKMQAFRIWDVNQKTFYLRNNQLVAGYLQGPNVNLEEKIDVVPIEPHALFLG
IHGGKMCLSCVKSGDETRLQLEAVNITDLSENRKQDKRFAFIRSDSGPTTSFESAACPGWFLCT
AMEADQPVSLTNMPDEGVMVTKFYFQEDE;
(SEQ ID NO: 228)
RPSGRKSSCMQAFRIWDVNQKTFYLRNNQLVAGYLQGPNVNLEEKIDVVPIEPHALFLG
IHGGKMCLSCVKSGDETRLQLEAVNITDLSENRKQDKRFAFIRSDSGPTTSFESAASPGWFLCT
AMEADQPVSLTNMPDEGVMVTKFYFQEDE;
(SEQ ID NO: 229)
RPSGRKSSCMQAFRIWDVNQKTFYLRNNQLVAGYLQGPNVNLEEKIDVVPIEPHALFLG
IHGGKMCLSCVKSGDETRLQLEAVNITDLSENRKQDKRFAFIRSDSGPTTSFESAACPGWFLCT
AMEADQPVSLTNMPDEGVMVTKFYFQEDE;
or
(SEQ ID NO: 230)
RPSGRKSSKMQAFRIWDVNQKTFYLRNNQLVAGYLQGPNVNLEEKIDVVPIEPHALFLG
IHGGKMCLSCVKSGDETRLQLEAVNITDLSENRKQDKRFAFIRSDSGPTTSFESAASPGWFLCT
AMEADQPVSLTNMPDEGCMVTKFYFQEDE.

2. The fusion protein of claim 1, wherein another polypeptide is a GLP-1 receptor binding polypeptide or an analogue thereof, the sequence of the polypeptide is
(SEQ ID NO: 231)
X_{G1}X_{G2}X_{G3}GX_{G5}X_{G6}TSDX_{G10}SX_{G12}YLEX_{G16}X_{G17}X_{G18}AX_{G20}X_{G21}FIX_{G24}X_{G25}
LX_{G27}X_{G28}X_{G29}X_{G30}X_{G31},
wherein
X_{G1} is a histidine, D-histidine, deamino-histidine, β-hydroxyl-histidine, homohistidine, α-fluoromethyl-histidine, α-methyl-histidine, N-methyl-histidine, N^{α}-acetyl-histidine, α-methyl-histidine, 2-pyridinyl-alanine, 3-pyridinyl-alanine, 4-pyridinyl-alanine, imidazopropionyl; X_{G2} is a 2-methylalanine, glycine, D-serine, serine, threonine, leucine, isoleucine, alanine, valine, aminocyclopropanecarboxylic acid, aminocyclobutanecarboxylic acid, aminocyclopentanecarboxylic acid, aminocyclohexanecarboxylic acid, aminocycloheptanecarboxylic acid, or aminocyclooctanecarboxylic acid; X_{G3} is a glutamic acid, aspartic acid, or glutamine; X_{G5} is a threonine, aspartic acid, glutamic acid, arginine, alanine, lysine, or histidine; X_{G6} is a phenylalanine, tyrosine, tryptophan, or histidine; X_{G10} is a valine, tyrosine, phenylalanine, tryptophan, histidine, leucine, isoleucine, serine, threonine, aspartic acid, glutamic acid, alanine, lysine, arginine, cysteine, general formula 1, or general formula 2; X_{G12} is a serine, isoleucine, lysine, arginine, cysteine, general formula 1, or general formula 2; X_{G16} is a glycine, serine, histidine, glutamic acid, aspartic acid, glutamine, asparagine, lysine, arginine, homoglutamic acid, cysteine, homocysteine, or sulfoalanine; X_{G17} is a glutamine, arginine, isoleucine, glutamic acid, aspartic acid, histidine, lysine, cysteine, general formula 1, or general formula 2; X_{G18} is an alanine, arginine, histidine, glutamic acid, or lysine; X_{G20} is a lysine, arginine, aspartic acid, glutamic acid, glutamine, histidine, 2-methylalanine, cysteine, general formula 1, or general formula 2; X_{G21} is an aspartic acid, glutamic acid, leucine, alanine, lysine, cysteine, general formula 1, or general formula 2; X_{G24} is an alanine, glutamine, asparagine, glutamic acid, aspartic acid, serine, or histidine; X_{G25} is an alanine, tryptophan, phenylalanine, tyrosine, cysteine, lysine, general formula 1, or general formula 2; X_{G27} is a valine, leucine, lysine, arginine, alanine, glycine, cysteine, general formula 1, or general formula 2; X_{G28} is a lysine, arginine, aspartic acid, glutamic acid, alanine, asparagine, cysteine, general formula 1, or general formula 2; X_{G29} is a glycine, glutamine, threonine, serine, lysine, arginine, cysteine, general formula 1, or general formula 2; X_{G30} is an arginine, lysine, glycine, histidine, cysteine, general formula 1, or general formula 2; X_{G31} is —NH₂, glycine, threonine, serine, aspartic acid, glutamic acid, tryptophan, tyrosine, phenylalanine, histidine, arginine, lysine, cysteine, linking group, or spacer group, general formula 3, general formula 4, or linking group, or spacer group+X_{G32}, in which X_{G32} is a lysine, cysteine, general formula 3, general formula 4, or absent; preferably, X_{G31} is a GPSSGAPPPS (SEQ ID NO:437), or PSSGAPPPS (SEQ ID NO:438), in which any one of the amino acid residues can be substituted, deleted, or be general formula 1, general formula 2, general formula 3, or general formula 4.

3. The fusion protein of claim 2, wherein the sequence of another polypeptide is
(SEQ ID NO: 232)
HX_{G2}EGTFTSDX_{G10}SSYLEX_{G16}QAAX_{G20}EFIAWLVX_{G28}GRX_{G31}.

4. The fusion protein of claim 2, wherein the sequence of another polypeptide is
(SEQ ID NO: 324)
X_{G1}X_{G2}EGTFTSDX_{G10}SX_{G12}YLEX_{G16}QAAX_{G20}EFIAWLVX_{G28}X_{G29}X_{G30}
(PX_{E32}X_{E33}GX_{E35}PPPC)ₜ₂;
(SEQ ID NO: 325)
X_{G1}X_{G2}EGTFTSDX_{G10}SX_{G12}YLEX_{G16}QAAX_{G20}EFIAWLVX_{G28}X_{G29}X_{G30}
(PX_{E32}X_{E33}GCPPPX_{E39})ₜ₂;
(SEQ ID NO: 326)
X_{G1}X_{G2}EGTFTSDX_{G10}SX_{G12}YLEX_{G16}QAAX_{G20}EFIAWLVX_{G28}X_{G29}X_{G30}
(PX_{E32}CGX_{E35}PPPX_{E39})ₜ₂;
(SEQ ID NO: 327)
X_{G1}X_{G2}EGTFTSDX_{G10}SX_{G12}YLEX_{G16}QAAX_{G20}EFIAWLVX_{G28}X_{G29}X_{G30}
(PCX_{E33}GX_{E35}PPPX_{E39})ₜ₂;
(SEQ ID NO: 328)
X_{G1}X_{G2}EGTFTSDX_{G10}SX_{G12}YLEX_{G16}QAAX_{G20}EFIAWLVX_{G28}X_{G29}X_{G30}C;
(SEQ ID NO: 329)
X_{G1}X_{G2}EGTFTSDX_{G10}SX_{G12}YLEX_{G16}QAAX_{G20}EFIAWLVX_{G28} X_{G29}C—NH₂;
(SEQ ID NO: 330)
X_{G1}X_{G2}EGTFTSDX_{G10}SX_{G12}YLEX_{G16}QAAX_{G20}EFIAWLVX_{G28}CX_{G30}X_{G31};
(SEQ ID NO: 331)
X_{G1}X_{G2}EGTFTSDX_{G10}SX_{G12}YLEX_{G16}QAAX_{G20}EFIAWLVCX_{G29}X_{G30}X_{G31};
(SEQ ID NO: 332)
X_{G1}X_{G2}EGTFTSDX_{G10}SX_{G12}YLEX_{G16}QAAX_{G20}EFIACLVX_{G28}X_{G29}X_{G30}X_{G31};
(SEQ ID NO: 333)
X_{G1}X_{G2}EGTFTSDX_{G10}SX_{G12}YLEX_{G16}QAACEFIAWLVX_{G28} X_{G29}X_{G30}X_{G31};
(SEQ ID NO: 334)
X_{G1}X_{G2}EGTFTSDX_{G10}SCYLEX_{G16}QAAX_{G20}EFIAWLVX_{G28} X_{G29}X_{G30}X_{G31};
(SEQ ID NO: 335)
X_{G1}X_{G2}EGTFTSDCSX_{G12}YLEX_{G16}QAAX_{G20}EFIAWLVX_{G28} X_{G29}X_{G30}X_{G31};
(SEQ ID NO: 336)
HX_{G2}EGTFTSDVSSYLEX_{G16}QAAKEFIAWLVKGRPSSGAPPPC;
(SEQ ID NO: 337)
HX_{G2}EGTFTSDVSSYLEX_{G16}QAAKEFIAWLVKGRPSSGCPPPS;
(SEQ ID NO: 338)
HX_{G2}EGTFTSDVSSYLEX_{G16}QAAKEFIAWLVKGRPSCGAPPPS;
(SEQ ID NO: 339)
HX_{G2}EGTFTSDVSSYLEX_{G16}QAAKEFIAWLVKGRPCSGAPPPS;
(SEQ ID NO: 340)
HX_{G2}EGTFTSDVSSYLEX_{G16}QAAKEFIAWLVKGRC;
(SEQ ID NO: 341)
HX_{G2}EGTFTSDVSSYLEX_{G16}QAAKEFIAWLVKGC-NH₂;
(SEQ ID NO: 342)
HX_{G2}EGTFTSDVSSYLEX_{G16}QAAKEFIAWLVKCRG;
(SEQ ID NO: 343)
HX_{G2}EGTFTSDVSSYLEX_{G16}QAAKEFIAWLVCGRG;
(SEQ ID NO: 344)
HX_{G2}EGTFTSDVSSYLEX_{G16}QAAKEFIAWLVCGR-NH₂;
(SEQ ID NO: 345)
HX_{G2}EGTFTSDVSSYLEX_{G16}QAAKEFIACLVKGRG;
(SEQ ID NO: 346)
HX_{G2}EGTFTSDVSSYLEX_{G16}QAACEFIAWLVKGRG;
(SEQ ID NO: 347)
HX_{G2}EGTFTSDVSSYLEX_{G16}QAACEFIAWLVKGR-NH₂;
(SEQ ID NO: 348)
HX_{G2}EGTFTSDVSCYLEX_{G16}QAAKEFIAWLVKGRG;
(SEQ ID NO: 349)
HX_{G2}EGTFTSDCSSYLEX_{G16}QAAKEFIAWLVKGRG;
(SEQ ID NO: 350)
HX_{G2}EGTFTSDCSSYLEX_{G16}QAAKEFIAWLVKGR-NH₂;
(SEQ ID NO: 351)
X_{G1}X_{G2}EGTFTSDX_{G10}SX_{G12}YLEX_{G16}QAAX_{G20}EFIAWLVX_{G28}X_{G29}X_{G30}
(PX_{E32}X_{E33}GX_{E35}PPPK)ₜ₂;;
(SEQ ID NO: 352)
X_{G1}X_{G2}EGTFTSDX_{G10}SX_{G12}YLEX_{G16}QAAX_{G20}EFIAWLVX_{G28}X_{G29}X_{G30}
(PX_{E32}X_{E33}GKPPPX_{E39})ₜ₂;
(SEQ ID NO: 353)
X_{G1}X_{G2}EGTFTSDX_{G10}SX_{G12}YLEX_{G16}QAAX_{G20}EFIAWLVX_{G28}X_{G29}X_{G30}
(PX_{E32}KGX_{E35}PPPX_{E39})ₜ₂;
(SEQ ID NO: 354)
X_{G1}X_{G2}EGTFTSDX_{G10}SX_{G12}YLEX_{G16}QAAX_{G20}EFIAWLVX_{G28}X_{G29}X_{G30}
(PKX_{E33}GX_{E35}PPPX_{E39})ₜ₂;
(SEQ ID NO: 355)
X_{G1}X_{G2}EGTFTSDX_{G10}SX_{G12}YLEX_{G16}QAAX_{G20}EFIAWLVX_{G28}X_{G29}X_{G30}K;
(SEQ ID NO: 356)
X_{G1}X_{G2}EGTFTSDX_{G10}SX_{G12}YLEX_{G16}QAAX_{G20}EFIAwLVX_{G28} X_{G29}K-NH₂;
(SEQ ID NO: 357)
X_{G1}X_{G2}EGTFTSDX_{G10}SX_{G12}YLEX_{G16}QAAX_{G20}EFIAWLVX_{G28}KX_{G30}X_{G31};
(SEQ ID NO: 358)
X_{G1}X_{G2}EGTFTSDX_{G10}SX_{G12}YLEX_{G16}QAAX_{G20}EFIAWLVK X_{G29}X_{G30}X_{G31};
(SEQ ID NO: 359)
X_{G1}X_{G2}EGTFTSDX_{G10}SX_{G12}YLEX_{G16}QAAX_{G20}EFIAKLVX_{G28} X_{G29}X_{G30}X_{G31};
(SEQ ID NO: 360)
X_{G1}X_{G2}EGTFTSDX_{G10}SX_{G12}YLEX_{G16}QAAKEFIAWLVX_{G28} X_{G29}X_{G30}X_{G31};
(SEQ ID NO: 361)
X_{G1}X_{G2}EGTFTSDX_{G10}SKYLEX_{G16}QAAX_{G20}EFIAWLVX_{G28}X_{G29}X_{G30}X_{G31};
(SEQ ID NO: 362)
X_{G1}X_{G2}EGTFTSDKSX_{G12}YLEX_{G16}QAAX_{G20}EFIAWLVX_{G28} X_{G29}X_{G30}X_{G31};
(SEQ ID NO: 363)
HX_{G2}EGTFTSDVSSYLEX_{G16}QAAREFIAWLVRGRPSSGAPPPK;
(SEQ ID NO: 364)
HX_{G2}EGTFTSDVSSYLEX_{G16}QAAREFIAWLVRGRPSSGKPPPS;
(SEQ ID NO: 365)
HX_{G2}EGTFTSDVSSYLEX_{G16}QAAREFIAWLVRGRPSKGAPPPS;
(SEQ ID NO: 366)
HX_{G2}EGTFTSDVSSYLEX_{G16}QAAREFIAWLVRGRPKSGAPPPS;
(SEQ ID NO: 367)
HX_{G2}EGTFTSDVSSYLEX_{G16}QAAREFIAWLVRGRK;
(SEQ ID NO: 368)
HX_{G2}EGTFTSDVSSYLEX_{G16}QAAREFIAWLVRGK-NH₂;
(SEQ ID NO: 369)
HX_{G2}EGTFTSDVSSYLEX_{G16}QAAREFIAWLVRKRG;
(SEQ ID NO: 370)
HX_{G2}EGTFTSDVSSYLEX_{G16}QAAREFIAWLVKGRG;
(SEQ ID NO: 371)
HX_{G2}EGTFTSDVSSYLEXG16QAAREFIAKLVRGRG;
(SEQ ID NO: 372)
HXG2EGTFTSDVSSYLEX_{G16}QAAKEFIAWLVRGRG;
(SEQ ID NO: 373)
HX_{G2}EGTFTSDVSSYLEX_{G16}QAAKEFIAWLVRGR-NH₂;
(SEQ ID NO: 374)
HX_{G2}EGTFTSDVSKYLEX_{G16}QAAREFIAWLVRGRG;
(SEQ ID NO: 375)
HX_{G2}EGTFTSDKSSYLEX_{G16}QAAREFIAWLVRGRG;
or
(SEQ ID NO: 376)
HX_{G2}EGTFTSDKSSYLEX_{G16}QAAREFIAWLVRGR-NH₂;
wherein t2 is 0 or 1.

5. The fusion protein of claim 2, wherein the sequence of said fusion protein is
(SEQ ID NO: 243)
X_{G1}X_{G2}X_{G3}GX_{G5}X_{G6}TSDX_{G10}SX_{G12}YLEX_{G16}X_{G17}X_{G18}AX_{G20}X_{G21}FIX_{G24}X_{G2}
₅LX_{G27}X_{G28}X_{G29}X_{G30}X_{G31}-Lⱼ-X_{IL0}RPSGRKSSKMQAFRIWDVNQKTFYL
RNNQLVAGYLQGPNVNLEEKIDVVPIEPHALFLGIHGGKMX_{IL66}L
SX_{IL69}VKSGDETRLQLEAVX_{IL84}ITDLSENRKQDKRFAFIRSDGSGPTT
SFESAAX_{IL116}PGWFLX_{IL122}TAMEADQPVSLTNMPDEGVMVTKFYFQE
DE,
or,
(SEQ ID NO: 244)
HX_{G2}EGTFTSDX_{G10}SX_{G12}YLEX_{G16}QAAX_{G20}EFIAWLVX_{G28}GRX_{G31}-Lⱼ-
X_{IL0}RPSGRKSSKMQAFRIWDVNQKTFYLRNNQLVAGYLQGPNVNLEEK
IDVVPIEPHALFLGIHGGKMVLSCVKSGDETRLQLEAVX_{IL84}ITDLSE
NRKQDKRFAFIRSDSGPTTSFESAAX_{IL116}PGWFLCTAMEADQPVSLTN
MPDEGVMVTKFYFQEDE;
or
(SEQ ID NO: 245)
HX_{G2}EGTFTSDX_{G10}SX_{G12}YLEX_{G16}QAAX_{G20}EFIAWLVX_{G28}GRX_{G31}-
(GGGGS)n-X_{L}-(GGGGS)ₙ-X_{IL0}RPSGRKSSKMQAFRIWDVNQKTFYL
RNNQLVAGYLQGPNVNLEEKIDVVPIEPHALFLGIHGGKMCLSCVKSG
DETRLQLEAVX_{IL84}ITDLSENRKQDKRFAFIRSDSGPTTSFESAA
X_{IL116}PGWFLCTAMEADQPVSLTNMPDEAGVMVTKFYFQEDE;
or
(SEQ ID NO: 246)
HX_{G2}EGTFTSDX_{G10}SSYLEX_{G16}QAAX_{G20}EFIAWLVX_{G28}GRG-
(GGGGS)ₘ-XL-(GGGGS)ₙ-X_{IL0}RPSGRKSSKMQAFRIWVNQKTFYLR
NNQLVAGYLQGPNVNLEEKIDVVPIEPHALFLGIHGGKMCLSCVKSGD
ETRLQLEAVNITDLSENRKQDKRFAFIRSDSGPTTSFESAAX_{IL116}PGW
FLCTAMEADQPVSLTNMPDEGVMVTKFYFQEDE;
or
(SEQ ID NO: 247)
HX_{G2}EGTFTSDX_{G10}SSYLEX_{G16}QAAX_{G20}EFIAWLVX_{G28}GRX_{G31}-
(GGGGS)ₙ-X_{IL0}RPSGRKSSKMQAFRIWDVNQKTFYLRNNQLVAGYLQ
GPNVNLEEKIDVVPIEPHALFLGIHGGKMCLSCVKSGDETRLQLEAVN
ITDLSENRKQDKRFAFIRSDSGPTTSFESAAX_{IL116}PGWFLCTAMEADQ
PVSLTNMPDEGVMVTKFYFQEDE;
or
(SEQ ID NO: 248)
HX_{G2}EGTFTSDVSSYLEX_{G16}QAAKEFIAWLVKGRG-(GGGGS)ₙ-
X_{IL0}RPSGRKSSKMQAFRIWDVNQKTFYLRNNQLVAGYLQGPNVNLEEK
IDVVPIEPHALFLGIHGGKMCLSCKSGDETRLQLEAVNITDLSENRKQ
DKRFAFIRSDSGPTTSFESSA (S-O_{L})PGWFLCTAME ADQPVSLTN
MPDEGVMVTKFYFQEDE (Sis the sulphur atom of the
side chain of a cysteine residue);
or
(SEQ ID NO: 249)
HX_{G2}EGTFTSDVSSYLEX_{G16}QAAKEFIAWLVKGRG(GGGGS)ₙ-
X_{IL0}RPSGRKSSKMQAFRIWDVNQKTFYLRNNQLVAGYLQGPNVNLEEK
IDVVPIEPHALFLGIHGGKMCLSCKVSGDETRLQLEAVC (S-
O_{L})ITDLSENRKQDKRFAFIRSDSGPTTSFESAASPGWFLCTAMEADQ
PVSLTNMPDEGVMVTKFYFQEDE (Sis the sulphur atom of
the side chain of a cysteine residue);
or
(SEQ ID NO: 250)
HX_{G2}EGTFTSDX_{G10}SSYLEX_{G16}QAAX_{G20}EFIAWLVX_{G28}GRPSSGAPPP
S-(GGGGS)ₘ-X_{L}-(GGGGS)ₙ-X_{IL0}RPSGRKSSKMQAFRIWDVNQKTF
YLRNNQLVAGYLQGPNVNLEEKKIDVVPIEPHALFLGIHGGKMCLSCV
KSGDETRLQLEAVNITDLSENRKQDKRFAFIRSDSGPTTSFESAA
X_{IL116}CPGWFLCTAMEADQPVSLTNMPDEGVMVTKFYFQEDE;
or
(SEQ ID NO: 251)
HX_{G2}EGTFTSDX_{G10}SSYLEX_{G16}QAAX_{G20}EFIAWLVX_{G28}GRPSSGAPPP
X_{G39}-(GGGGS)ₙ-X_{IL0}RPSGRKSSKMQAFRIWDVNQKTFYLRNNQLVA
GYLQGPNVNLEEKIDVVPIEPHALFLGIHGGKMCLSCVKSGDETRLQL
EAVNITDLSENRKQDKRFAFIRSDSGPTTSFESAAX_{IL116}PGWFLCTAM
EADQPVSLTNMPDGVMVTKFYFQEDE;
or
(SEQ ID NO: 252)
HX_{G2}EGTFTSDVSSYLEX_{G16}QAAKEFIAWLVKGRPSSGAPPPS-
(GGGGS)ₙ-X_{IL0}RPSGRKSSKMQAFRIWDVNQKTFYLRNNQLVAGYLQ
GPNVNLEEKIDVVPIEPHALFLGIHGGKMCLSCVKSGDETRLQLEAVN
ITDLSENRKQDKRFAFIRSDSGPTTSFESAAC (S-O_{L})PGWF LCTA
MEADQPVSLTNMPDEGVMVTKFYFQEDE (S is the sulphur
atom of the side chain of a cysteine residue);
or
(SEQ ID NO: 253)
HX_{G2}EGTFTSDVSSYLEX_{G16}QAAKEFIAWLVKGRPSSGAPPPS-
(GGGGS)ₙ-X_{IL0}RPSGRKSSKMQAFRIWDVNQKTFYLRNNQLVAGYLQ
GPNVNLEEKIDVVPIEPHALFLGIHGGKMCLSCVKSGDETRLQLEAVC
(S-O_{L})ITDLSENRKQDKRFAFIRSDSGPTTSFESAASPGWFLCTAME
ADQPVSLTNMPDEGVMVTKFYFQEDE (S is the sulphur
atom of the side chain of a cysteine residue);
or
(SEQ ID NO: 268)
U_{L}-X_{IL0}RPSGRKSSKMQAFRIWDVNQKTFYLRNNQLVAGYLQGPNVNL
EEKIDVVPIEPHALFLGIHGGKMCLSCVKSGDETRLQLEAVNITDLSE
NRKQDKRFAFIRSDSGPTTSFESAAC (linking group-GLP-1
receptor binding polypeptide) PGWFLCTAMEADQPVSLT
NMPDEGVMVTKFYF QEDE;
or
(SEQ ID NO: 269)
U_{L}-X_{IL0}RPSGRKSSKMQAFRIWDVNQKTFYLRNNQLVAGYLQGPNVNL
EEKIDVVPIEPHALFLGIHGGKMCLSCVKSGDETRLQLEAVC
(linking group-GLP-1 receptor binding
polypeptide) ITDLSENRKQDKRFAFIRSDSGPTTSFESAASPGW
FLCTAMEADQPVSLTNMPDGEVMVTKFYFQEDE;
or
(SEQ ID NO: 377)
(GLP-1 receptor binding polypeptide-linking
group-C_{IL0}-X_{IL0}RPSGRKSSKMQAFRIWDVNQKTFYLRNNQLVAGY
LQGPNVNLEEKIDVVPIEPHALFLGIHGGKMX_{IL66}LSX_{IL69}VKSGDETR
LQLEAVX_{IL84}ITDLSENRKQDKRFAFIRSDSGPTTSFESAAX_{IL116}PGW
FLX_{IL122}TAMEADQPVSLTNMPDEGVMVTKFYFQEDE;
or
(SEQ ID NO: 378)
C_{IL0} (linking group-GLP-1 receptor binding
polypeptide X_{IL0}RPSGRKSSKMQAFRIWDVNQKTFYLRNNQLVAGY
LQGPNVNLEEKIDVVPIEPHALFLGIHGGKMCSLCVKSGDETRLQLEAV
NITDLSENRKQDKRFAFIRSDSGPTTSFESAAX_{IL116}PGWFLCTAMEAD
DQPVSLTNMPDEGVMVTKFYFQEDE;
or
(SEQ ID NO: 379)
U_{L}-X_{IL0}RPSGRKSSKMQAFRIWDVNQKTYFLRNNQLVAGYLQGPNVNLE
EKIDVVPIEPHALFLGIHGGKMX_{IL66}LSX_{IL69}VKSGDETRLQLEAV
X_{IL84}ITDLSENRKQDKRFAFIRSDSGPTTSFESAAX_{IL116}PGWFLX_{IL122}
TAMEADQPVSLTNMPDEGVMVTKFYFQEDEC_{IL153} (linking
group-GLP-1 receptor binding polypeptide);

6. The fusion protein of claim 1, wherein
another polypeptide is a GLP-1 receptor binding polypeptide or an analogue thereof, the sequence of another polypeptide is
(SEQ ID NO: 233)
X_{E1}X_{E2}X_{E3}GTX_{E6}TSDX_{E10}SX_{E12}X_{E13}X_{E14}EX_{E16}X_{E17}AX_{E19}X_{E20XE21}
FX_{E23}X_{E24}LX_{E27}X_{E28}X_{E29}X_{E30}X_{E31}X_{E32}X_{E33}X_{E34}X_{E35}X_{E36}X_{E37}X_{E38}
X_{E39},
wherein
X_{E1} is a histidine, D-histidine, deamino-histidine, β-hydroxyl-histidine, homohistidine, α-fluoromethyl-histidine, α-methyl-histidine, N-methyl-histidine, N^{α}-acetyl-histidine, α-methyl-histidine, 2-pyridinyl-alanine, 3-pyridinyl-alanine, 4-pyridinyl-alanine, imidazopropionyl, arginine or tyrosine; X_{E2} is a glycine, alanine, 2-methylalanine, D-serine, serine, threonine, leucine, isoleucine, valine, aminocyclopropanecarboxylic acid, aminocyclobutanecarboxylic acid, aminocyclopentanecarboxylic acid, aminocyclohexanecarboxylic acid, aminocycloheptanecarboxylic acid or aminocyclooctanecarboxylic acid; X_{E3} is an aspartic acid, glutamic acid or glutamine; X_{E6} is a phenylalanine, alanine, tyrosine or Naphthylalanine; X_{E10} is a leucine, isoleucine, tyrosine, valine, alanine, lysine, cysteine, general formula 1, general formula 2 or pentaglycine; X_{E12} is a lysine, cysteine, arginine, serine, isoleucine or general formula 1 or general formula 2; X_{E13} is a glutamine, alanine or tyrosine; X_{E14} is a methionine, leucine, norleucine, isoleucine, alanine, valine or general formula 1 or general formula 2; X_{E16} is a glutamic acid, aspartic acid, serine, glycine, lysine or arginine; X_{E17} is a glutamic acid, glutamine, arginine or isoleucine; X_{E19} is a valine, alanine or glutamine; X_{E20} is a lysine, glutamine, cysteine, arginine or general formula 1 or general formula 2; X_{E21} is a leucine, glutamic acid or aspartic acid; X_{E23} is an isoleucine, leucine, valine, pentaglycine; X_{E24} is an alanine, glutamic acid, aspartic acid, asparagine or glutamine; X_{E25} is an alanine, tryptophan, phenylalanine, tyrosine, cysteine, lysine, Naphthylalanine, general formula 1 or general formula 2; X_{E27} is a lysine, cysteine, asparagine, leucine, valine, arginine, general formula 1 or general formula 2; X_{E28} is an asparagine, lysine, cysteine, arginine, alanine, general formula 1 or general formula 2; X_{E29} is a-NH₂, glycine, glutamine, threonine, lysine, cysteine or absent; X_{E30} is a-NH₂, glycine, tyrosine, arginine, lysine, cysteine, general formula 1, general formula 2 or absent; X_{E31} is a-NH₂, glycine, proline, homoproline, thioproline, N-alkyl alanine or absent; X_{E32} is a serine, lysine, cysteine, absent, general formula 1 or general formula 2; X_{E33} is a serine, lysine, cysteine, general formula 1, general formula 2 or absent; X_{E34} is a glycine, absent, general formula 1 or general formula 2; X_{E35} is an alanine, lysine, cysteine, general formula 1, general formula 2 or absent; X_{E36} is a proline, homoproline, thioproline, N-alkyl alanine or absent; X_{E37} is a proline, homoproline, thioproline, N-alkyl alanine or absent; X_{E38} is a proline, homoproline, thioproline, N-alkyl alanine or absent; X_{E39} is a serine, serine-NH₂, cysteine, cysteine-NH₂, lysine, lysine-NH₂ or absent, or a linking group or spacer group +X_{E40}, X_{E40} is a lysine, cysteine, general formula 3 or general formula 4.

7. The fusion protein of claim 6, wherein the sequence of another polypeptide is
(SEQ ID NO: 234)
X_{E1}GEGTFTSDLSX_{E12}QX_{E14}EEEAVX_{E20}LFIEWLX_{E27}X_{E28}X_{E29}
X_{E30}X_{E31}X_{E32}X_{E33}X_{E34}X_{E35}X_{E36}X_{E37}X_{E38}X_{E39}.

8. The fusion protein of claim 6, wherein the sequence of another polypeptide is
(SEQ ID NO: 270)
X_{E1}X_{E2}EGTFTSDX_{E10}SX_{E12}QX_{E14}EEEAVX_{E20}LFIEWLX_{E27}X_{E28}X_{E29}X_{E30}(PX_{E32}X_{E33}
GX_{E35}PPPC)ₜ₂;
(SEQ ID NO: 271)
X_{E1}X_{E2}EGTFTSDX_{E10}SX_{E12}QX_{E14}EEEAVX_{E20}LFIEWLX_{E27}X_{E28}X_{E29}X_{E30}(PX_{E32}X_{E33}GCP
PPX_{E39})ₜ₂;
(SEQ ID NO: 272)
X_{E1}X_{E2}EGTFTSDX_{E10}SX_{E12}QX_{E14}EEEAVX_{E20}LFIEWLX_{E27}X_{E28}X_{E29}X_{E30}(PX_{E32}CGX_{E35}P
PPX_{E39})ₜ₂;
(SEQ ID NO: 273)
X_{E1}X_{E2}EGTFTSDX_{E10}SX_{E12}QX_{E14}EEEAVX_{E20}LFIEWLX_{E27}X_{E28}X_{E29}X_{E30}(PCX_{E33}GX_{E35}P
PPX_{E39})ₜ₂;
(SEQ ID NO: 274)
X_{E1}X_{E2}EGTFTSDX_{E10}SX_{E12}QX_{E14}EEEAVX_{E20}LFIEWLX_{E27}X_{E28}X_{E29}C(PX_{E32}X_{E33}GX_{E35}P
PPX_{E39})ₜ₂;
(SEQ ID NO: 275)
X_{E1}X_{E2}EGTFTSDX_{E10}SX_{E12}QX_{E14}EEEAVX_{E20}LFIEWLX_{E27}X_{E28}CX_{E30}(PX_{E32}X_{E33}GX_{E35}P
PPX_{E39})ₜ₂;
(SEQ ID NO: 276)
X_{E1}X_{E2}EGTFTSDX_{E10}SX_{E12}QX_{E14}EEEAVX_{E20}LFIEWLX_{E27}CX_{E29}X_{E30}(PX_{E32}X_{E33}GX_{E35}P
PPX_{E39})ₜ₂;
(SEQ ID NO: 277)
X_{E1}X_{E2}EGTFTSDX_{E10}SX_{E12}QX_{E14}EEEAVX_{E20}LFIEWLCX_{E28}X_{E29}X_{E30}(PX_{E32}X_{E33}GX_{E35}P
PPX_{E39})ₜ₂;
(SEQ ID NO: 278)
X_{E1}X_{E2}EGTFTSDX_{E10}SX_{E12}QX_{E14}EEEAVCLFIEWLX_{E27}X_{E28}X_{E29}X_{E30}(PX_{E32}X_{E33}GX_{E35}P
PPX_{E39})ₜ₂;
(SEQ ID NO: 279)
X_{E1}X_{E2}EGTFTSDX_{E10}SX_{E12}QCEEEAVX_{E20}LFIEWLX_{E27}X_{E28}X_{E29}X_{E30}(PX_{E32}X_{E33}GX_{E35}P
PPX_{E39})ₜ₂;
(SEQ ID NO: 280)
X_{E1}X_{E2}EGTFTSDX_{E10}SCQX_{E14}EEEAVX_{E20}LFIEWLX_{E27}X_{E28}X_{E29}X_{E30}(PX_{E32}X_{E33}GX_{E35}P
PPX_{E39})ₜ₂;
(SEQ ID NO: 281)
X_{E1}X_{E2}EGTFTSDCSX_{E12}QX_{E14}EEEAVX_{E20}LFIEWLX_{E27}X_{E28}X_{E29}X_{E30}(PX_{E32}X_{E33}GX_{E35}P
PPX_{E39})ₜ₂;
(SEQ ID NO: 297)
X_{E1}X_{E2}EGTFTSDX_{E10}SX_{E12}QX_{E14}EEEAVX_{E20}LFIEWLX_{E27}X_{E28}X_{E29}X_{E30}(PX_{E32}X_{E33}G
X_{E35}PPPK)ₜ₂;
(SEQ ID NO: 298)
X_{E1}X_{E2}EGTFTSDX_{E10}SX_{E12}QX_{E14}EEEAVX_{E20}LFIEWLX_{E27}X_{E28}X_{E29}X_{E30}(PX_{E32}X_{E33}GKP
PPX_{E39})ₜ₂;
(SEQ ID NO: 299)
X_{E1}X_{E2}EGTFTSDX_{E10}SX_{E12}QX_{E14}EEEAVX_{E20}LFIEWLX_{E27}X_{E28}X_{E29}X_{E30}(PX_{E32}KGX_{E35}P
PPX_{E39})ₜ₂;
(SEQ ID NO: 300)
X_{E1}X_{E2}EGTFTSDX_{E10}SX_{E12}QX_{E14}EEEAVX_{E20}LFIEWLX_{E27}X_{E28}X_{E29}X_{E30}(PKX_{E33}GX_{E35}P
PPX_{E39})ₜ₂;
(SEQ ID NO: 301)
X_{E1}X_{E2}EGTFTSDX_{E10}SX_{E12}QX_{E14}EEEAVX_{E20}LFIEWLX_{E27}X_{E28}x_{E29}K(PX_{E32}X_{E33}GX_{E35}P
PPX_{E39})ₜ₂;
(SEQ ID NO: 302)
X_{E1}X_{E2}EGTFTSDX_{E10}SX_{E12}QX_{E14}EEEAVX_{E20}LFIEWLX_{E27}X_{E28}KX_{E30}(PX_{E32}X_{E33}GX_{E35}P
PPX_{E39})ₜ₂;
(SEQ ID NO: 303)
X_{E1}X_{E2}EGTFTSDX_{E10}SX_{E12}QX_{E14}EEEAVX_{E20}LFIEWLX_{E27}KX_{E29}X_{E30}(PX_{E32}X_{E33}GX_{E35}P
PPX_{E39})ₜ₂;
(SEQ ID NO: 304)
X_{E1}X_{E2}EGTFTSDX_{E10}SX_{E12}QX_{E14}EEEAVX_{E20}LFIEWLKX_{E28}X_{E29}X_{E30}(PX_{E32}X_{E33}GX_{E35}P
PPX_{E39})ₜ₂;
(SEQ ID NO: 305)
X_{E1}X_{E2}EGTFTSDX_{E10}SX_{E12}QX_{E14}EEEAVKLFIEWLX_{E27}X_{E28}X_{E29}X_{E30}(PX_{E32}X_{E33}GX_{E35}P
PPX_{E39})ₜ₂;
(SEQ ID NO: 306)
X_{E1}X_{E2}EGTFTSDX_{E10}SX_{E12}QKEEEAVX_{E20}LFIEWLX_{E27}X_{E28}X_{E29}X_{E30}(PX_{E32}X_{E33}GX_{E35}P
PPX_{E39})ₜ₂;
(SEQ ID NO: 307)
X_{E1}X_{E2}EGTFTSDX_{E10}SKQX_{E14}EEEAVX_{E20}LFIEWLX_{E27}X_{E28}X_{E29}X_{E30}(PX_{E32}X_{E33}GX_{E35}P
PPX_{E39})ₜ₂;
or
(SEQ ID NO: 308)
X_{E1}X_{E2}EGTFTSDKSX_{E12}QX_{E14}EEEAVX_{E20}LFIEWLX_{E27}X_{E28}X_{E29}X_{E30}(PX_{E32}X_{E33}GX_{E35}P
PPX_{E39})ₜ₂;
t2 is 0 or 1;
preferably the sequence of another polypeptide is
(SEQ ID NO: 282)
HGEGTFTSDLSKQMEEEAVRLFIEWLKNGGPSSGAPPPSC;
(SEQ ID NO: 185)
HGEGTFTSDLSKQMEEEAVRLFIEWLKNGGPSSGAPPPC;
(SEQ ID NO: 284)
HGEGTFTSDLSKQMEEEAVRLFIEWLKNGGPSSGCPPPS;
(SEQ ID NO: 285)
HGEGTFTSDLSKQMEEEAVRLFIEWLKNGGPSCGAPPPS;
(SEQ ID NO: 286)
HGEGTFTSDLSKQMEEEAVRLFIEWLKNGGPCSGAPPPS;
(SEQ ID NO: 287)
HGEGTFTSDLSKQMEEEAVRLFIEWLKNGCPSSGAPPPS;
(SEQ ID NO: 288)
HGEGTFTSDLSKQMEEEAVRLFIEWLKNCGPSSGAPPPS;
(SEQ ID NO: 289)
HGEGTFTSDLSKQMEEEAVRLFIEWLKCGGPSSGAPPPS;
(SEQ ID NO: 188)
HGEGTFTSDLSKQMEEEAVRLFIEWLCNGGPSSGAPPPS;
(SEQ ID NO: 291)
HGEGTFTSDLSKQMEEEAVRLFIECLKNGGPSSGAPPPS;
(SEQ ID NO: 292)
HGEGTFTSDLSKQMEEEAVCLFIEWLKNGGPSSGAPPPS;
(SEQ ID NO: 293)
HGEGTFTSDLSKQCEEEAVRLFIEWLKNGGPSSGAPPPS;
(SEQ ID NO: 294)
HGEGTFTSDLSCQMEEEAVRLFIEWLKNGGPSSGAPPPS;
(SEQ ID NO: 295)
HGEGTFTSDCSKQMEEEAVRLFIEWLKNGGPSSGAPPPS;
(SEQ ID NO: 296)
HGEGTFTSDLSKQMEEEAVRLFIEWLKNGGC;
(SEQ ID NO: 309)
HGEGTFTSDLSRQMEEEAVRLFIEWLRNGGPSSGAPPPSK;
(SEQ ID NO: 310)
HGEGTFTSDLSRQMEEEAVRLFIEWLRNGGPSSGAPPPK;
(SEQ ID NO: 311)
HGEGTFTSDLSRQMEEEAVRLFIEWLRNGGPSSGKPPPS;
(SEQ ID NO: 312)
HGEGTFTSDLSRQMEEEAVRLFIEWLRNGGPSKGAPPPS;
(SEQ ID NO: 313)
HGEGTFTSDLSRQMEEEAVRLFIEWLRNGGPKSGAPPPS;
(SEQ ID NO: 314)
HGEGTFTSDLSRQMEEEAVRLFIEWLRNGKPSSGAPPPS;
(SEQ ID NO: 315)
HGEGTFTSDLSRQMEEEAVRLFIEWLRNKGPSSGAPPPS;
(SEQ ID NO: 316)
HGEGTFTSDLSRQMEEEAVRLFIEWLRKGGPSSGAPPPS;
(SEQ ID NO: 317)
HGEGTFTSDLSRQMEEEAVRLFIEWLKNGGPSSGAPPPS;
(SEQ ID NO: 318)
HGEGTFTSDLSRQMEEEAVRLFIEKLRNGGPSSGAPPPS;
(SEQ ID NO: 319)
HGEGTFTSDLSRQMEEEAVKLFIEWLRNGGPSSGAPPPS;
(SEQ ID NO: 320)
HGEGTFTSDLSRQKEEEAVRLFIEWLRNGGPSSGAPPPS;
(SEQ ID NO: 321)
HGEGTFTSDLSKQMEEEAVRLFIEWLRNGGPSSGAPPPS;
(SEQ ID NO: 322)
HGEGTFTSDKSRQMEEEAVRLFIEWLRNGGPSSGAPPPS;
or
(SEQ ID NO: 323)
HGEGTFTSDLSRQMEEEAVRLFIEWLRNGK-NH₂.

9. The fusion protein of claim 6, wherein the sequence of said fusion protein is
(SEQ ID NO: 235)
X_{E1}X_{E2}X_{E3}GTX_{E6}TSDX_{E10}SX_{E12}X_{E13}X_{E14}EX_{E16}X_{E17}AX_{E19}X_{E20}X_{E21}FX_{E23}X_{E24}X_{E25}LX_{E27}
X_{E28}X_{E29}X_{E30}X_{E31}X_{E32}X_{E33}X_{E34}X_{E35}X_{E36}X_{E37}X_{E38}X_{E39}-Lⱼ-
X_{IL0}RPSGRKSSKMQAFRIWDVNQKTFYLRNNQLVAGYLQGPNVNLEEKIDVVPIEPHALFLGIH
GGKMX_{IL66}LSX_{IL69}VKSGDETRLQLEAVX_{IL84}ITDLSENRKQDKRFAFIRSDSGPTTSFESAA
X_{IL116}PGWFLX_{IL122}TAMEADQPVSLTNMPDEGVMVTKFYFQEDE;
or
(SEQ ID NO: 236)
X_{E1}X_{E2}EGTFTSDX_{E10}SX_{E12}QX_{E14}EEEAVX_{E20}LFIEWLX_{E27}X_{E28}X_{E29}X_{E30}X_{E31}X_{E32}X_{E33}
X_{E34}X_{E35}X_{E36}X_{E37}X_{E38}X_{E39}-Lⱼ-
X_{IL0}RPSGRKSSKMQAFRIWDVNQKTFYLRNNQLVAGYLQGPNVNLEEKIDVVPIEPHALFLGIH
GGKMX_{IL66}LSX_{IL69}VKSGDETRLQLEAVX_{IL84}ITDLSENRKQDKRFAFIRSDSGPTTSFESAA
X_{IL116}PGWFLX_{IL122}TAMEADQPVSLTNMPDEGVMVTKFYFQEDE;
or
(SEQ ID NO: 237)
HX_{E2}EGTFTSDX_{E10}SX_{E12}QX_{E14}EEEAVX_{E20}LFIEWLX_{E27}X_{E28}X_{E29}X_{E30}(PX_{E32}X_{E33}GX_{E35}
PPPX_{E39})ₜ₂-Lⱼ-
X_{IL0}RPSGRKSSKMQAFRIWDVNQKTFYLRNNQLVAGYLQGPNVNLEEKIDVVPIEPHALFLGIH
GGKMCLSCVKSGDETRLQLEAVX_{IL84}ITDLSENRKQDKRFAFIRSDSGPTTSFESAAX_{IL116}PGW
FLCTAMEADQPVSLTNMPDEGVMVTKFYFQEDE;
or
(SEQ ID NO: 238)
HX_{E2}EGTFTSDX_{E10}SX_{E12}QX_{E14}EEEAVX_{E20}LFIEWLX_{E27}X_{E28}X_{E29}X_{E30}(PX_{E32}X_{E33}GX_{E35}
PPPX_{E39})ₜ₂-(GGGGS)ₘ-X_{L}-(GGGGS)ₙ-
X_{IL0}RPSGRKSSKMQAFRIWDVNQKTFYLRNNQLVAGYLQGPNVNLEEKIDVVPIEPHALFLGIH
GGKMCLSCVKSGDETRLQLEAVX_{IL84}ITDLSENRKQDKRFAFIRSDSGPTTSFESAAX_{IL116}PGW
FLCTAMEADQPVSLTNMPDEGVMVTKFYFQEDE,
or
(SEQ ID NO: 239)
HGEGTFTSDLSX_{E12}QMEEEAVRLFIEWLX_{E27}NGGPSSGAPPPS-(GGGGS)ₘ-X_{L}-
(GGGGS)ₙ-
X_{IL0}RPSGRKSSKMQAFRIWDVNQKTFYLRNNQLVAGYLQGPNVNLEEKIDVVPIEPHALFLGIH
GGKMCLSCVKSGDETRLQLEAVNITDLSENRKQDKRFAFIRSDSGPTTSFESAAX_{IL116}PGWFLC
TAMEADQPVSLTNMPDEGVMVTKFYFQEDE;
or
(SEQ ID NO: 240)
HGEGTFTSDLSX_{E12}QMEEEAVRLFIEWLX_{E27}NGGPSSGAPPPX_{E39}-(GGGGS)ₙ-
X_{IL0}RPSGRKSSKMQAFRIWDVNQKTFYLRNNQLVAGYLQGPNVNLEEKIDVVPIEPHALFLGIH
GGKMCLSCVKSGDETRLQLEAVNITDLSENRKQDKRFAFIRSDSGPTTSFESAAX_{IL116}PGWFLC
TAMEADQPVSLTNMPDEGVMVTKFYFQEDE;
wherein m and n are each 0, 1, 2, 3, 4, 5, or 6; X_{L} is a cysteine, lysine, absent, general formula 1 or general formula 2; t2 is 0 or 1.

10. The fusion protein of claim 2, the sequence of which is
(SEQ ID NO: 241)
HGEGTFTSDLSKQMEEEAVRLFIEWLKNGGPSSGAPPPS-(GGGGS)ₙ-
X_{IL0}RPSGRKSSKMQAFRIWDVNQKTFYLRNNQLVAGYLQGPNVNLEEKIDVVPIEPHALFLGIH
GGKMCLSCVKSGDETRLQLEAVNITDLSENRKQDKRFAFIRSDSGPTTSFESAAC(S—O_{L})
PGWFLC TAMEADQPVSLTNMPDEGVMVTKFYFQEDE (S is the sulphur
atom of the side chain of a cysteine residue);
or
(SEQ ID NO: 242)
HGEGTFTSDLSKQMEEEAVRLFIEWLKNGGPSSGAPPPS-(GGGGS)ₙ-
X_{IL0}RPSGRKSSKMQAFRIWDVNQKTFYLRNNQLVAGYLQGPNVNLEEKIDVVPIEPHALFLGIH
GGKMCLSCVKSGDETRLQLEAVC (S—O_{L})
ITDLSENRKQDKRFAFIRSDSGPTTSFESAASPGWFLC TAME
ADQPVSLTNMPDEGVMVTKFYFQEDE (S is the sulphur atom of
the side chain of a cysteine residue);
(SEQ ID NO: 248)
HX_{G2}EGTFTSDVSSYLEX_{G16}QAAKEFIAWLVKGRG-(GGGGS)ₙ-
X_{IL0}RPSGRKSSKMQAFRIWDVNQKTFYLRNNQLVAGYLQGPNVNLEEKIDVVPIEPHALFLGIH
GGKMCLSCVKSGDETRLQLEAVNITDLSENRKQDKRFAFIRSDSGPTTSFESAAC (S—O_{L})
PGWFLCTAME ADQPVSLTNMPDEGVMVTKFYFQEDE (S is the sulphur
atom of the side chain of a cysteine residue);
or
(SEQ ID NO: 249)
HX_{G2}EGTFTSDVSSYLEX_{G16}QAAKEFIAWLVKGRG-(GGGGS)ₙ-
X_{IL0}RPSGRKSSKMQAFRIWDVNQKTFYLRNNQLVAGYLQGPNVNLEEKIDVVPIEPHALFLGIH
GGKMCLSCVKSGDETRLQLEAVC (S—O_{L})ITDLSENRKQDKRFAFIRSDSGPTTSFESAASPGWFLCTAME
ADQPVSLTNMPDEGVMVTKFYFQEDE (S is the sulphur atom of the side
chain of a cysteine residue);
or
(SEQ ID NO: 252)
HX_{G2}EGTFTSDVSSYLEX_{G16}QAAKEFIAWLVKGRPSSGAPPPS-(GGGGS)ₙ-
X_{IL0}RPSGRKSSKMQAFRIWDVNQKTFYLRNNQLVAGYLQGPNVNLEEKIDVVPIEPHALFLGIH
GGKMCLSCVKSGDETRLQLEAVNITDLSENRKQDKRFAFIRSDSGPTTSFESAAC (S—O_{L})
PGWF LCTAMEADQPVSLTNMPDEGVMVTKFYFQEDE (S is the sulphur
atom of the side chain of a cysteine residue);
or
(SEQ ID NO: 253)
HX_{G2}EGTFTSDVSSYLEX_{G16}QAAKEFIAWLVKGRPSSGAPPPS-(GGGGS)ₙ-
X_{IL0}RPSGRKSSKMQAFRIWDVNQKTFYLRNNQLVAGYLQGPNVNLEEKIDVVPIEPHALFLGIH
GGKMCLSCVKSGDETRLQLEAVC (S—O_{L})ITDLSENRKQDKRFAFIRSDSGPTTSFESAASPGWF
LCTAMEADQPVSLTNMPDEGVMVTKFYFQEDE (S is the sulphur
atom of the side chain of a cysteine residue),
or
(SEQ ID NO: 268)
U_{L}-
X_{IL0}RPSGRKSSKMQAFRIWDVNQKTFYLRNNQLVAGYLQGPNVNLEEKIDVVPIEPHALFLGIH
GGKMCLSCVKSGDETRLQLEAVNITDLSENRKQDKRFAFIRSDSGPTTSFESAAC
(linking group - GLP-1 receptor binding polypeptide)
PGWFLCTAMEADQPVSLINMPDEGVMVTKFYFQEDE;
(SEQ ID NO: 269)
U_{L}-
X_{IL0}RPSGRKSSKMQAFRIWDVNQKTFYLRNNQLVAGYLQGPNVNLEEKIDVVPIEPHALFLGIH
GGKMCLSCVKSGDETRLQLEAVC (linking group - GLP-1 receptor
binding polypeptide) ITDLSE
NRKQDKRFAFIRSDSGPTTSFESAASPGWFLCTAMEADQPVSLTNMPDEGVMVTKFYFQEDE;
(SEQ ID NO: 377)
(GLP-1 receptor binding polypeptide - linking group)-C_{IL0}-
X_{IL0}RPSGRKSSKMQAFRIWDVNQKTFYLRNNQLVAGYLQGPNVNLEEKIDVVPIEPHALFLGIH
GGKMX_{IL66}LSX_{IL69}VKSGDETRLQLEAVX_{IL84}ITDLSENRKQDKRFAFIRSDSGPTTSFESAA
X_{IL116}PGWFLX_{IL122}TAMEADQPVSLTNMPDEGVMVTKFYFQEDE;
or
(SEQ ID NO: 378)
C_{IL0} (linking group - GLP-1 receptor binding polypeptide)
X_{IL0}RPSGRKSSKMQAFRIWDVNQKTFYLRNNQLVAGYLQGPNVNLEEKIDVVPIEPHALFLGIH
GGKMCLSCVKSGDETRLQLEAVNITDLSENRKQDKRFAFIRSDSGPTTSFESAAX_{IL116}PGWFLC
TAMEADQPVSLTNMPDEGVMVTKFYFQEDE;
or
(SEQ ID NO: 379)
U_{L}-
X_{IL0}RPSGRKSSKMQAFRIWDVNQKTFYLRNNQLVAGYLQGPNVNLEEKIDVVPIEPHALFLGIH
GGKMX_{IL66}LSX_{IL69}VKSGDETRLQLEAVX_{IL84}ITDLSENRKQDKRFAFIRSDSGPTTSFESAA
X_{IL116}PGWFLX_{IL122}TAMEADQPVSLTNMPDEGVMVTKFYFQEDEC_{IL153}
(linking group - GLP-1 receptor binding polypeptide);
wherein m and n are each 0, 1, 2, 3, 4, 5, or 6, C_{IL0}, C_{IL153} are a cysteine or absent; U_{L} is a structure of -W-X-Y-Z, fatty acid, polyethylene glycol, albumin, IgG Fc, hydrogen atom or N^{α}—(N^{α}—(HOOC (CH₂)ₙCO)-γ-Glu)-, N^{α}—(N^{α}—(CH₃ (CH₂)ₙCO)-γ-Glu)- or is general formula 5.

11. The fusion protein of claim 2, selected from the compounds G-1 to G-84.

12. The fusion protein of claim 1, wherein
another polypeptide is an insulin receptor binding polypeptide or an analogue thereof, the sequence of another polypeptide is
(SEQ ID NO: 383)
X_{IN107}HLC_{[1]}GSX_{IN108}LVEALYLVC_{[2]}GEX_{IN109}X_{IN111}X_{IN112}X_{IN113}X_{IN114}
X_{IN115}-C_{L}-GIVEQC_{[3]}C_{[4]}X_{IN127}SIC_{[5]}SLYQLENYC_{[6]}X_{IN128}X_{IN129},
wherein
X_{IN107} is a tetrapeptide of phenylalanine-valine-asparagine-glutamine, a tripeptide of valine-asparagine-glutamine, a dipeptide of asparagine-glutamine, glutamine, a sequence wherein any one of the amino acid residues in the sequence of the tetrapeptide, tripeptide, and dipeptide is substituted with a lysine or arginine, or absent; X_{IN108} is a histidine, phenylalanine, arginine, or glutamine; X_{IN109} is an arginine, alanine, glutamic acid, or aspartic acid; X_{IN110} is a phenylalanine, tyrosine, or histidine; X_{IN111} is a tyrosine, phenylalanine, or absent; X_{IN112} is a threonine, asparagine, or absent; X_{IN113} is a proline, lysine, glutamic acid, aspartic acid, or absent; X_{IN114} is a lysine, proline, arginine, glutamic acid, aspartic acid or absent; X_{IN115} is a threonine, or absent; X_{IN127} is a threonine, histidine, or arginine; X_{IN128} is an alanine, glycine, or asparagine; X_{IN129} is a lysine, a dipeptide of arginine-lysine, or absent;
C_{L} is a peptide sequence of 6-60 amino acids, wherein the amino acids are primarily selected from the group consisting of glycine, alanine, serine, threonine, proline;
C_{L} is preferably
(SEQ ID NO: 384)
GX_{IN116}X_{IN117}X_{IN118}X_{IN119}X_{IN120}X_{IN121}X_{IN122}X_{IN123}X_{IN124}X_{IN125}
X_{IN126},
wherein
X_{IN116} is a lysine, cysteine, serine, or alanine; X_{IN117} is a glycine, lysine, or serine; X_{IN118} is a lysine or serine; X_{IN119} is a lysine or serine; X_{IN120} is a lysine, serine, or alanine; X_{IN121} is a glycine, lysine, arginine, alanine, proline, or absent;
X_{IN122} is a glycine, alanine, arginine, lysine, glutamine, proline, or absent; X_{IN123} is an arginine, lysine, glycine, alanine, proline, threonine, glutamine, or absent; X_{IN124} is a proline, glutamine, lysine, glycine, arginine, or absent; X_{IN125} is a glutamine, threonine, lysine, glycine, arginine, or absent; X_{IN126} is a threonine, arginine, lysine, or absent;
C_{L} is further preferably
(SEQ ID NO: 385)
GAGSSSAAAPQT,
(SEQ ID NO: 386)
GSGSSSAAAPQT,
(SEQ ID NO: 387)
GSGSSSAAPQT,
(SEQ ID NO: 388)
GSGSSSAPQT,
or
(SEQ ID NO: 389)
GSGSSAPQT.

13. The fusion protein of claim 12, wherein the sequence of another polypeptide is
(SEQ ID NO: 393)
U_{L}-X_{IN300}HLC_{[1]}GSHLVEALYLVC_{[2]}GERGFX_{IN301}X_{IN302}X_{IN303}X_{IN304}
X_{IN305}X_{IN306}GX_{IN307}X_{IN308}X_{IN309}X_{IN310}X_{IN311}X_{IN312}X_{IN313}X_{IN314}X_{IN315}
X_{IN316}X_{IN317}GIVEQC_{[3]}C_{[4]}X_{IN318}SIC_{[5]}X_{IN319}LX_{IN320}X_{IN321}LX_{IN322}
X_{IN323}YC_{[6]}X_{IN324}X_{IN325},
(SEQ ID NO: 394)
U_{L}-FVNQHLCGSHLVEALYLVCGERGFFX_{IN302}X_{IN303}X_{IN304}X_{IN305}X_{IN306}
GX_{IN307}X_{IN308}X_{IN309}X_{IN310}X_{IN311}X_{IN312}X_{IN313}X_{IN314}X_{IN315}X_{IN316}X_{IN317}
GIVEQCCTSICSLYQLENYCNX_{IN325},
(SEQ ID NO: 414)
U_{L}-X_{IN107}HLC_{[1]}GSH_{IN108}LVEALYLVC_{[2]}GEX_{IN109}GFX_{IN110}X_{IN111}
X_{IN112}X_{IN113}X_{IN114}X_{IN116}-C_{L}-GIVEQC_{[3]}C_{[4]}X_{IN127}SICSLYQLENY
C_{[6]}X_{IN128}X_{IN129};
or
(SEQ ID NO: 415)
U_{L}-X_{IN107}HLC_{[1]}GSHLVEALYLVC_{[2]}GERGFX_{IN110}X_{IN111}X_{IN112}X_{IN113}
X_{IN114}X_{IN115}-C_{L}-GIVEQC_{[3]}C_{[4]}TSICSLYQLENYC_{[6]}X_{IN128}X_{IN129};
or
(SEQ ID NO: 416)
U_{L}-FVNQHLC_{[1]}GSHLVEALYLVC_{[2]}GERFGGYTPX_{IN114}T-C_{L}-GIVEQ
C_{[3]}C_{[4]}TSIC_{[5]}SLYQLENYC_{[6]}N;
or
(SEQ ID NO: 417)
U_{L}-FVNQHLC_{[1]}GSHLVEALYLVC_{[2]}GERGFFYTPX_{IN114}TGKGSSSAAA
PQTGIVEQC_{[3]}C_{[4]}TSIC_{[5]}SLYQLENYC_{[6]}N;
or
(SEQ ID NO: 418)
U_{L}-FVNQHLC_{[1]}GSHLVEALYLVC_{[2]}GERGFFYTPX_{IN114}TGSGKSSAAA
PQTGIVEQC_{[3]}C_{[4]}TSIC_{[5]}SLYQLENYC_{[6]}N;
or
(SEQ ID NO: 419)
U_{L}-FVNQHLC_{[1]}GSHLVEALYLVC_{[2]}GERGFFYTPX_{IN114}TGSGSKSAAA
PQTGIVEQC_{[3]}C_{[4]}TISC_{[5]}SLYQLENYC_{[6]}N;
or
(SEQ ID NO: 420)
U_{L}-FVNQHLC_{[1]}GSHLVEALYLVC_{[2]}GERGFFYTPX_{IN114}TGSGSSKAAA
PQTGIVEQC_{[3]}C_{[4]}TSIC_{[5]}SLYQLENYC_{[6]}N;
or
(SEQ ID NO: 421)
U_{L}-FVNQHLC_{[1]}GSHLVEALYLVC_{[2]}GERGFFYTPX_{IN114}TGSGSSSKAA
PQTGIVEQC_{[3]}C_{[4]}TSIC_{[5]}SLYQLENYC_{[6]}N;
or
(SEQ ID NO: 422)
U_{L}-FVNQHLC_{[1]}GSHLVEALYLVC_{[2]}GERGFFYTPX_{IN114}TGSGSSSAKA
PQTGIVEQC_{[3]}C_{[4]}TSIC_{[5]}SLYQLENYC_{[6]}N;
or
(SEQ ID NO: 423)
U_{L}-FVNQHLC_{[1]}GSHLVEALYLVC_{[2]}GERGFFYTPX_{IN114}TGSGSSSAAK
PQTGIVEQC_{[3]}C_{[4]}TSIC_{[5]}SLYQLENYC_{[6]}N;
or
(SEQ ID NO: 424)
U_{L}-FVNQHLC_{[1]}GSHLVEALYLVC_{[2]}GERGFFYTPX_{IN114}TGSGSSSAAA
PQTGIVEQC_{[3]}C_{[4]}TSIC_{[5]}SLYQLENYC_{[6]}N;
or
(SEQ ID NO: 425)
FVNQHLC_{[1]}GSHLVEALYLVC_{[2]}GERGFFYTPX_{IN114}TGSGSSSAAAPQT
GIVEQC_{[3]}C_{[4]}TSIC_{[5]}SLYQLENYC_{[6]}N;
or
(SEQ ID NO: 426)
U_{L}-FVNQHLC_{[1]}GSHLVEALYLVC_{[2]}GERGFFGSGSSSAAKPQTGIVEQ
C_{[3]}C_{[4]}TSIC_{[5]}SLYQLENYC_{[6]}N;
or
(SEQ ID NO: 427)
U_{L}-FVNQHLC_{[1]}GSHLVEALYLVC_{[2]}GERGFFGSGSSSAKAPQTGIVEQ
C_{[3]}C_{[4]}TSIC_{[5]}SLYQLENYC_{[6]}N;
or
(SEQ ID NO: 428)
U_{L}-FVNQHLC_{[1]}GSHLVEALYLVC_{[2]}GERGFFGSGSSSKAAPQTGIVEQ
C_{[3]}C_{[4]}TSIC_{[5]}SLYQLENYC_{[6]}N;
or
(SEQ ID NO: 429)
U_{L}-FVNQHLC_{[1]}GSHLVEALYLVC_{[2]}GERGFFGSGSSSAAAPQTGIVEQ
C_{[3]}C_{[4]}TSIC_{[5]}SLYQLENYC_{[6]}NK;
or
(SEQ ID NO: 430)
FVNQHLC_{[1]}GSHLVEALYLVC_{[2]}GERGFFGSGSSSAAAPQTGIVEQC_{[3]}
C_{[4]}TSIC_{[5]}SLYQLENYC_{[6]}N;
wherein
X_{IN300} is a tetrapeptide of phenylalanine-valine-asparagine-glutamine, tripeptide of valine-asparagine-glutamine, a dipeptide of asparagine-glutamine, glutamine, a sequence wherein any one of the amino acid residues in the sequence of the tetrapeptide, tripeptide, and dipeptide is substituted with a lysine or arginine, or absent; X_{IN301} is a phenylalanine, histidine or tyrosine; X_{IN302} is a —NH₂, tyrosine, phenylalanine, or absent; X_{IN303} is a threonine, asparagine, or absent; X_{IN304} is a proline, lysine, glutamic acid, aspartic acid, or absent; X_{IN30} S is an aspartic acid, glutamic acid, proline, arginine, lysine, absent or a structure of general formula 1; X_{IN306} is a threonine, a structure of general formula 1, or absent; X_{IN307} is a serine, alanine, glycine, lysine, a structure of general formula 1, or absent; X_{IN308} is a glycine, a structure of general formula 1, or absent; X_{IN309} is a lysine, glycine, serine, a structure of general formula 1, or absent; X_{IN310} is a lysine, glycine, serine, a structure of general formula 1, or absent; X_{IN311} is a lysine, glycine, serine, alanine, a structure of general formula 1, or absent; X_{IN312} is a lysine, arginine, alanine, proline, glycine, a structure of general formula 1, or absent; X_{IN313} is a glycine, alanine, arginine, lysine, glutamine, proline, a structure of general formula 1, or absent; X_{IN314} is an arginine, alanine, proline, threonine, glutamine, glycine, a structure of general formula 1, or absent; X_{IN315} is a proline, glutamine, arginine, glycine, absent, or a structure of general formula 1; X_{IN316} is a glutamine, threonine, arginine, glycine, absent, or a structure of general formula 1; X_{IN317} is a threonine, arginine, lysine, or absent; X_{IN318} is a threonine, histidine, arginine or a structure of general formula 1; X_{IN319} is a serine or a structure of general formula 1; X_{IN320} is a tyrosine or a structure of general formula 1; X_{IN321} is a glutamine or a structure of general formula 1; X_{IN322} is a glutamic acid or a structure of general formula 1; X_{IN323} is an asparagine or a structure of general formula 1; X_{IN324} is an aspartic acid, glycine, alanine, or a structure of general formula 1; X_{IN325} is a lysine, general formula 3, arginine-general formula 3, or absent.

14. The fusion protein of claim 12, wherein the sequence of said fusion protein is
(SEQ ID NO: 395)
U_{L}-
X_{IN107}HLC_{[1]}GSX_{IN108}LVEALYLVC_{[2]}GEX_{IN109}GFX_{IN110}X_{IN111}X_{IN112}X_{IN113}X_{IN114}X_{IN115}-
C_{L}-GIVEQC_{[3]}C_{[4]}X_{IN127}SIC_{[5]}SLYQLENYC_{[6]}X_{IN128}X_{IN129}-Lⱼ-
X_{IL0}RPSGRKSSKMQAFRIWDVNQKTFYLRNNQLVAGYLQGPNVNLEEKIDVVPIEPHALFLGIH
GGKMX_{IL66}LSX_{IL69}VKSGDETRLQLEAVX_{IL84}ITDLSENRKQDKRFAFIRSDSGPTTSFESAA
X_{IL116}PGWFLX_{IL122}TAMEADQPVSLTNMPDEGVMVTKFYFQEDE,
or
(SEQ ID NO: 396)
U_{L}-X_{IN107}HLC_{[1]}GSHLVEALYLVC_{[2]}GERGFX_{IN110}X_{IN111}X_{IN112}X_{IN113}X_{IN114}X_{IN115}-
C_{L}-GIVEQC_{[3]}C_{[4]}TSIC_{[5]}SLYQLENYC_{[6]}-(GGGGS)ₘ-X_{L}-(GGGGS)ₙ-
X_{IL0}RPSGRKSSKMQAFRIWDVNQKTFYLRNNQLVAGYLQGPNVNLEEKIDVVPIEPHALFLGIH
GGKMX_{IL66}LSX_{IL69}VKSGDETRLQLEAVX_{IL84}ITDLSENRKQDKRFAFIRSDSGPTTSFESAA
X_{IL116}PGWFLX_{IL122}TAMEADQPVSLTNMPDEGVMVIKFYFQEDE,
or
(SEQ ID NO: 397)
U_{L}-FVNQHLC_{[1]}GSHLVEALYLVC_{[2]}GERGFFYTPKT-C_{L}-
GIVEQC_{[3]}C_{[4]}TSIC_{[5]}SLYQLENYC_{[6]}N-(GGGGS)ₘ-X_{L}-(GGGGS)ₙ-
X_{IL0}RPSGRKSSKMQAFRIWDVNQKTFYLRNNQLVA
GYLQGPNVNLEEKIDVVPIEPHALFLGIHGGKMX_{IL66}LSX_{IL69}VKSGDETRLQLEAVNITDLSEN
RKQDKRFAFIRSDSGPTTSFESAAX_{IL116}PGWFLX_{IL122}TAMEADQPVSLTNMPDEGVMVTKFYFQ
EDE,
or
(SEQ ID NO: 398)
U_{L}-FVNQHLC_{[1]}GSHLVEALYLVC_{[2]}GERGFFYTPKT-C_{L}-
GIVEQC_{[3]}C_{[4]}TSIC_{[5]}SLYQLENYC_{[6]}N-(GGGGS)ₙ-
X_{IL0}RPSGRKSSKMQAFRIWDVNQKTFYLRNNQLVAGYLQGPNVNLEEKIDVVPIEPHALFLGIH
GGKMX_{IL66}LSX_{IL69}VKSGDETRLQLEAVNITDLSENRKQDKRFAFIRSDSGPTTSFESAAX_{IL116}P
GWFLX_{IL122}TAMEADQPVSLTNMPDEGVMVTKFYFQEDE;
or
(SEQ ID NO: 399)
U_{L}-
X_{IL0}RPSGRKSSKMQAFRIWDVNQKTFYLRNNQLVAGYLQGPNVNLEEKIDVVPIEPHALFLGIH
GGKMX_{IL66}LSX_{IL69}VKSGDETRLQLEAVX_{IL84}ITDLSENRKQDKRFAFIRSDSGPTTSFESAA
X_{IL116}PGWFLX_{IL122}TAMEADQPVSLTNMPDEGVMVTKFYFQEDE-Lⱼ-
X_{IN107}HLC_{[1]}GSX_{IN108}LVEALYLVC_{[2]}GEX_{IN109}GFX_{IN110}X_{IN111}X_{IN112}X_{IN113}X_{IN114}X_{IN115}-
C_{L}-GIVEQC_{[3]}C_{[4]}X_{IN127}SIC_{[5]}SLYQLENYC_{[6]}X_{IN128}X_{IN129};
or
(SEQ ID NO: 400)
U_{L}-
X_{IL0}RPSGRKSSKMQAFRIWDVNQKTFYLRNNQLVAGYLQGPNVNLEEKIDVVPIEPHALFLGIH
GGKMX_{IL66}LSX_{IL69}VKSGDETRLQLEAVX_{IL84}ITDLSENRKQDKRFAFIRSDSGPTTSFESAA
X_{IL116}PGWFLX_{IL122}TAMEADQPVSLTNMPDEGVMVTKFYFQEDE-(GGGGS)ₘ-X_{L}-(GGGGS)ₙ-
X_{IN107}HLC_{[1]}GSHLVEALYLVC_{[2]}GERGFX_{IN110}X_{IN111}X_{IN112}X_{IN113}X_{IN114}X_{IN115}-C_{L}-
GIVEQC_{[3]}C_{[4]}TSIC_{[5]}SLYQLENYC_{[6]}X_{IN128}X_{IN129};
or
(SEQ ID NO: 401)
U_{L}-
X_{IL0}RPSGRKSSKMQAFRIWDVNQKTFYLRNNQLVAGYLQGPNVNLEEKIDVVPIEPHALFLGIH
GGKMX_{IL66}LSX_{IL69}VKSGDETRLQLEAVNITDLSENRKQDKRFAFIRSDSGPTTSFESAAX_{IL116}P
GWFLX_{IL122}TAMEADQPVSLTNMPDEGVMVTKFYFQEDE-(GGGGS)ₘ-X_{L}-(GGGGS)ₙ-
FVNQHLC_{[1]}GSHLVEALYLVC_{[2]}GERGFFYTPKT-C_{L}-
GIVEQC_{[3]}C_{[4]}TSIC_{[5]}SLYQLENYC_{[6]}N;
or
(SEQ ID NO: 402)
U_{L}-
X_{IL0}RPSGRKSSKMQAFRIWDVNQKTFYLRNNQLVAGYLQGPNVNLEEKIDVVPIEPHALFLGIH
GGKMX_{IL66}LSX_{IL69}VKSGDETRLQLEAVNITDLSENRKQDKRFAFIRSDSGPTTSFESAAX_{IL116}P
GWFLX_{IL122}TAMEADQPVSLTNMPDEGVMVTKFYFQEDE-(GGGGS)ₙ-
FVNQHLC_{[1]}GSHLVEALYLVC_{[2]}GERGFFYTPKT-C_{L}-
GIVEQC_{[3]}C_{[4]}TSIC_{[5]}SLYQLENYC_{[6]}N;
or
(SEQ ID NO: 403)
U_{L}-
X_{IL0}RPSGRKSSKMQAFRIWDVNQKTFYLRNNQLVAGYLQGPNVNLEEKIDVVPIEPHALFLGIH
GGKMX_{IL66}LSX_{IL69}VKSGDETRLQLEAVX_{IL84}ITDLSENRKQDKRFAFIRSDSGPTTSFESAA
X_{IL116}PGWFLX_{IL122}TAMEADQPVSLTNMPDEGVMVTKFYFQEDE-(GGGGS)ₘ-X_{L}-(GGGGS)ₙ-
FVNQHLCGSHLVEALYLVCGERGFFYTPKTGSGSSSAAAPQTGIVEQCCTSICSLYQLENYCN;
or
(SEQ ID NO: 410)
U_{L}-
X_{IL0}RPSGRKSSKMQAFRIWDVNQKTFYLRNNQLVAGYLQGPNVNLEEKIDVVPIEPHALFLGIH
GGKMX_{IL66}LSX_{IL69}VKSGDETRLQLEAVNITDLSENRKQDKRFAFIRSDSGPTTSFESAAC
(the linking group - the insulin receptor binding
polypeptide)PGWFLX_{IL122}TAMEADQPVSLTNMPDE GVMVTKFYFQEDE;
or
(SEQ ID NO: 411)
U_{L}-
X_{IL0}RPSGRKSSKMQAFRIWDVNQKTFYLRNNQLVAGYLQGPNVNLEEKIDVVPIEPHALFLGIH
GGKMX_{IL66}LSX_{IL69}VKSGDETRLQLEAVC(the linking group - the
insulin receptor binding polypeptide)
ITDLSENRKQDKRFAFIRSDSGPTTSFESAASPGWFLX_{IL122}TAMEADQPVSLTNMPDEGVMVTK
FYFQEDE;
or
(SEQ ID NO: 412)
(the insulin receptor binding polypeptide - the linking
group)-C_{IL0}-
X_{IL0}RPSGRKSSKMQAFRIWDVNQKTFYLRNNQLVAGYLQGPNVNLEEKIDVVPIEPHALFLGIH
GGKMX_{IL66}LSX_{IL69}VKSGDETRLQLEAVX_{IL84}ITDLSENRKQDKRFAFIRSDSGPTTSFESAA
X_{IL116}PGWFLX_{IL122}TAMEADQPVSLTNMPDEGVMVTKFYFQEDE,
(SEQ ID NO: 413)
U_{L}-
X_{IL0}RPSGRKSSKMQAFRIWDVNQKTFYLRNNQLVAGYLQGPNVNLEEKIDVVPIEPHALFLGIH
GGKMX_{IL66}LSX_{IL69}VKSGDETRLQLEAVXIL84ITDLSENRKQDKRFAFIRSDSGPTTSFESAA
X_{IL116}PGWFLX_{IL122}TAMEADQPVSLTNMPDEGVMVTKFYFQEDEC_{IL153}
(the linking group - the insulin receptor binding
polypeptide),
(SEQ ID NO: 434)
(the insulin receptor binding polypeptide - the linking
group)RPSGRKSSKMQAFRIWDVNQKTFYLRNNQLVAGYLQGPNVNLEEKIDVVPIEPHALFL
GIHGGKMX_{IL66}LSX_{IL69}VKSGDETRLQLEAVNITDLSENRKQDKRFAFIRSDSGPTTSFESAA
X_{IL116}PGWFLX_{IL122}TAMEADQPVSLTNMPDEGVMVTKFYFQEDE;
or
(SEQ ID NO: 435)
(the insulin receptor binding polypeptide - the linking
group)CRPSGRKSSKMQAFRIWDVNQKTFYLRNNQLVAGYLQGPNVNLEEKIDVVPIEPHALF
LGIHGGKMX_{IL66}LSX_{IL69}VKSGDETRLQLEAVNITDLSENRKQDKRFAFIRSDSGPTTSFESAAS
PGWFLX_{IL122}TAMEADQPVSLTNMPDEGVMVTKFYFQEDE;
in which m and n are 0, 1, 2, 3, 4, 5, or 6; X_{L} is a cysteine, lysine, absent, general formula 1 or general formula 2; C_{IL0} and C_{IL153} are cysteine or absent; [1] to [6] indicates the No. of the cysteines; 3 pairs of disulfide bonds are formed with six cysteines in the compound, and the specific positions of the three pairs of disulfide bonds are: C_{[1]} and C_{[4]} forming a disulfide bond, C_{[2]} and C_{[6]} forming a disulfide bond, C_{[3]} and C_{[5]} forming a disulfide bond.

15. The fusion protein of claim 12, wherein said fusion protein is selected from the compounds IN-1 to IN-70.

16. The fusion protein of claim 1, wherein
another polypeptide is a GIP receptor binding polypeptide or an analogue thereof, the sequence of another polypeptide is
(SEQ ID NO: 439)
(X_{GI1}X_{GI2}X_{GI3}GT)ₜ₀X_{GI6}X_{GI7}SDX_{GI10}SX_{GI12}X_{GI13}X_{GI14}DX_{GI16}X_{GI17}
X_{GI18}QX_{GI20}X_{GI21}FX_{GI23}X_{GI24}WLX_{GI27}X_{GI28}X_{GI29}X_{GI30}X_{GI31}X_{GI32}X_{GI33}
X_{GI34}X_{GI35}X_{GI36}X_{GI37}X_{GI38}X_{GI39}X_{GI40}X_{GI41}X_{GI42}X_{GI43},
wherein
X_{GI1} is a tyrosine, N-acetyl tyrosine, pyroglutamyl-tyrosine, glucitol-tyrosine, D-histidine, α-2 methylimidazolyl acetic acid (DMIA), N-methylhistidine, α-methylhistidine, imidazole acetic acid, deamino-histidine, hydroxylhistidine, acetylhistidine, homohistidine, N-palmitic acid-tyrosine, N-Fmoc-tyrosine, or absent; X_{G12} is an alanine, D-alanine, D-serine, serine, valine, glycine, N-methylserine, N-methylalanine, 2-methylalanine, or absent; X_{GI3} is a glutamic acid, hydroxyl proline, proline, or absent; X_{GI6} is a phenylalanine, or absent; X_{GI7} is an isoleucine, or threonine; X_{GI10} is a tyrosine, tryptophan, phenylalanine, valine, lysine, ornithine, glutamic acid, leucine, general formula 1, or general formula 2; X_{GI12} is an isoleucine, serine, lysine, arginine, general formula 1, or general formula 2; X_{GI13} is an alanine, glutamine, or tyrosine; X_{GI14} is a methionine or leucine; X_{GI16} is a lysine, arginine, serine, glutamic acid, glutamine, homoglutamic acid, homocysteine, threonine, glycine, 2-methylalanine, general formula 1, or general formula 2; X_{GI17} is an isoleucine, glutamine, glutamic acid, arginine, general formula 1, or general formula 2; X_{GI18} is a histidine, alanine, arginine, serine, threonine, or glycine; X_{GI20} is a glutamine, lysine, alanine, serine, threonine, citrulline, arginine, ornithine, 2-methylalanine, other α,α-disubstituted amino acids, general formula 1, or general formula 2; X_{GI21} is an aspartic acid, glutamic acid, homoglutamic acid, homocysteine, leucine, general formula 1, or general formula 2; X_{GI23} is a valine, or isoleucine; X_{GI24} is a glutamine, glutamic acid, asparagine, alanine, serine, threonine, 2-methylalanine, general formula 1, or general formula 2; X_{GI27} is a leucine, isoleucine, norleucine, lysine, valine, methionine, general formula 1, or general formula 2; X_{GI28} is a glycine, alanine, lysine, asparagine, general formula 1, or general formula 2; X_{GI29} is a glutamine, glycine, threonine, alanine, general formula 1, or general formula 2; X_{GI30} is a lysine, arginine, glycine, general formula 1, or general formula 2; X_{GI31} is —NH₂, glycine, proline, or absent; X_{GI32} is a lysine, arginine, serine, general formula 1, general formula 2, or absent; X_{GI33} is a lysine, arginine, serine, general formula 1, general formula 2, or absent; X_{GI34} is an asparagine, glycine, or absent; X_{G135} is an asparagine, alanine, or absent; X_{GI36} is a tryptophan, proline, or absent; X_{GI37} is a lysine, arginine, proline, general formula 1, general formula 2, or absent; X_{GI38} is a histidine, proline, or absent; X_{GI39} is an asparagine, serine, or absent; X_{GI40} is an isoleucine, —NH₂, general formula 1, general formula 2, or absent; X_{GI41} is a threonine or absent; X_{GI42} is a glutamine or absent; X_{GI43} is a lysine, cysteine, PSSGAPPPS, general formula 3, general formula 4, or absent; t0 is 0 or 1;
preferably the sequence of another polypeptide is
(SEQ ID NO: 457)
X_{GI1}X_{GI2}X_{GI3}GTFISDYSIAMDKIHQQDFVNWLLAQKGKKNDWKHNITQC;
(SEQ ID NO: 458)
X_{GI1}X_{GI2}X_{GI3}GTFISDYSIAMDKIHQQDFVNWLLAQKGKKNDWCHNITQ;
(SEQ ID NO: 459)
X_{GI1}X_{GI2}X_{GI3}GTFISDYSIAMDKIHQQDFVNWLLAQKGKCNDWKHNITQ;
(SEQ ID NO: 460)
X_{GI1}X_{GI2}X_{GI3}GTFISDYSIAMDKIHQQDFVNWLLAQKGCKNDWKHNITQ;
(SEQ ID NO: 461)
X_{GI1}X_{GI2}X_{GI3}GTFISDYSIAMDKIHQQDFVNWLLAQCGKKNDWKHNITQ;
(SEQ ID NO: 462)
X_{GI1}X_{GI2}X_{GI3}GTFISDYSIAMDCIHQQDFVNWLLAQKGKKNDWKHNITQ;;
(SEQ ID NO: 463)
X_{GI1}X_{GI2}X_{GI3}GTFISDYSCAMDKIHQQDFVNWLLAQKGKKNDWKHNITQ;
(SEQ ID NO: 464)
X_{GI1}X_{GI2}X_{GI3}GTFISDCSIAMDKIHQQDFVNWLLAQKGKKNDWKHNITQ;
(SEQ ID NO: 465)
X_{GI1}X_{GI2}XGI3GTFISDYSIAMDKIHQQDFVNWLLAQKC;
(SEQ ID NO: 466)
X_{GI1}X_{GI2}X_{GI3}GTFISDYSIAMDCIHQQDFVNWLLAQK-NH₂;
(SEQ ID NO: 467)
X_{GI1}X_{GI2}X_{GI3}GTFISDYSIAMDKIHQQDFVNWLLAQKPSSGAPPPSC;
(SEQ ID NO: 468)
X_{GI1}X_{GI2}X_{GI3}GTFISDYSIAMDKIHQQDFVNWLLAQKPSSGAPPPC-NH₂;
(SEQ ID NO: 469)
X_{GI1}X_{GI2}X_{GI3}GTFISDYSIAMDKIHQQDFVNWLLAQCPSSGAPPPS-NH₂;
(SEQ ID NO: 470)
X_{GI1}X_{GI2}X_{GI3}GTFISDYSIAMDCIHQQDFVNWLLAQKPSSGAPPPS-NH₂;
(SEQ ID NO: 471)
X_{GI1}X_{GI2}X_{GI3}GTFISDYSCAMDKIHQQDFVNWLLAQKPSSGAPPPS-NH₂;
(SEQ ID NO: 472)
X_{GI1}X_{GI2}X_{GI3}GTFISDCSIAMDKIHQQDFVNWLLAQKPSSGAPPPS-NH₂;
(SEQ ID NO: 473)
FISDYSIAMDKIHQQDFVNWLLAQKC;
(SEQ ID NO: 474)
FISDYSIAMDKIHQQDFVNWLLAQC-NH₂;
(SEQ ID NO: 475)
FISDYSIAMDCIHQQDFVNWLLAQK-NH₂;
(SEQ ID NO: 476)
ISDYSIAMDKIHQQDFVNWLLAQC-NH₂;
(SEQ ID NO: 477)
ISDYSIAMDCIHQQDFVNWLLAQK-NH₂;
(SEQ ID NO: 478)
X_{GI1}X_{GI2}X_{GI3}GTFISDYSIAMDRIHQQDFVNWLLAQRGRRNDWRHNITQK;
(SEQ ID NO: 479)
X_{GI1}X_{GI2}X_{GI3}GTFISDYSIAMDRIHQQDFVNWLLAQRGRRNDWKHNITQ;
(SEQ ID NO: 480)
X_{GI1}X_{GI2}X_{GI3}GTFISDYSIAMDRIHQQDFVNWLLAQRGRKNDWRHNITQ;
(SEQ ID NO: 481)
X_{GI1}X_{GI2}X_{GI3}GTFISDYSIAMDRIHQQDFVNWLLAQRGKRNDWRHNITQ;
(SEQ ID NO: 482)
X_{GI1}X_{GI2}X_{GI3}GTFISDYSIAMDRIHQQDFVNWLLAQKGRRNDWRHNITQ;
(SEQ ID NO: 483)
X_{GI1}X_{GI2}X_{GI3}GTFISDYSIAMDKIHQQDFVNWLLAQRGRRNDWRHNITQ;
(SEQ ID NO: 484)
X_{GI1}X_{GI2}X_{GI3}GTFISDYSKAMDRIHQQDFVNWLLAQRGRRNDWRHNITQ;
(SEQ ID NO: 485)
X_{GI1}X_{GI2}X_{GI3}GTFISDKSIAMDRIHQQDFVNWLLAQRGRRNDWRHNITQ;
(SEQ ID NO: 486)
X_{GI1}X_{GI2}X_{GI3}GTFISDYSIAMDRIHQQDFVNWLLAQRPSSGAPPPSK;
(SEQ ID NO: 487)
X_{GI1}X_{GI2}X_{GI3}GTFISDYSIAMDRIHQQDFVNWLLAQRPSSGAPPPK-NH₂;
(SEQ ID NO: 488)
X_{GI1}X_{GI2}X_{GI3}GTFISDYSIAMDRIHQQDFVNWLLAQKPSSGAPPPS-NH₂;
(SEQ ID NO: 489)
X_{GI1}X_{GI2}X_{GI3}GTFISDYSIAMDKIHQQDFVNWLLAQRPSSGAPPPS-NH₂;
(SEQ ID NO: 490)
X_{GI1}X_{GI2}X_{GI3}GTFISDKSIAMDRIHQQDFVNWLLAQRPSSGAPPPS-NH₂;
(SEQ ID NO: 491)
X_{GI1}X_{GI2}X_{GI3}GTFISDYSIAMDRIHQQDFVNWLLAQK-NH₂;
(SEQ ID NO: 492)
X_{GI1}X_{GI2}X_{GI3}GTFISDYSIAMDKIHQQDFVNWLLAQR-NH₂;
(SEQ ID NO: 493)
FISDYSIAMDRIHQQDFVNWLLAQK-NH₂;
(SEQ ID NO: 494)
FISDYSIAMDKIHQQDFVNWLLAQR-NH₂;
(SEQ ID NO: 495)
ISDYSIAMDRIHQQDFVNWLLAQK-NH₂;
or
(SEQ ID NO: 496)
ISDYSIAMDKIHQQDFVNWLLAQR-NH₂.

17. The fusion protein of claim 16, wherein the sequence of said fusion protein is
(SEQ ID NO: 443)
U_{L}-
(X_{GI1}X_{GI2}X_{GI3}GT)ₜ₀X_{GI6}X_{GI7}SDX_{GI10}SX_{GI12}X_{GI13}X_{GI14}DX_{GI16}X_{GI17}X_{GI18}QX_{GI20}X_{GI21}
FX_{GI23}X_{GI24}WLX_{GI27}X_{GI28}X_{GI29}X_{GI30}X_{GI31}X_{GI32}X_{GI33}X_{GI34}X_{GI35}X_{GI36}X_{GI37}X_{GI38}
X_{GI39}X_{GI40}X_{GI41}X_{GI42}X_{GI43}-Lⱼ-
X_{IL0}RPSGRKSSKMQAFRIWDVNQKTFYLRNNQLVAGYLQGPNVNLEEKIDVVPIEPHALFLGIH
GGKMX_{IL66}LSX_{IL69}VKSGDETRLQLEAVX_{IL84}ITDLSENRKQDKRFAFIRSDSGPTTSFESAA
X_{IL116}PGWFLX_{IL122}TAMEADQPVSLTNMPDEGVMVTKFYFQEDE;
or
(SEQ ID NO: 444)
U_{L}-
(X_{GI1}X_{GI2}X_{GI3}GT)ₜ₀X_{GI6}ISDX_{GI10}SX_{GI12}AMDX_{GI16}IHQQDFVNWLX_{GI27}X_{GI28}QX_{GI30}
(GX_{GI32}X_{GI33}NDWX_{GI37}HNITQ)ₜ₁(PSSGAPPPS)ₜ₂-(GGGGS)ₘ-X_{L}-(GGGGS)ₙ-
RPSGRKSSKMQAFRIWDVNQKTFYLRNNQLVAGYLQGPNVNLEEKIDVVPIEPHALFLGIHGGK
MCLSCVKSGDETRLQLEAVX_{IL84}ITDLSENRKQDKRFAFIRSDSGPTTSFESAAX_{IL116P}GWFLC
TAMEADQPVSLTNMPDEGVMVTKFYFQEDE;
or
(SEQ ID NO: 445)
U_{L}-
X_{GI1}X_{GI2}X_{GI3}GTFISDYSIAMDKIHQQDFVNWLLAQK(GKKNDWKHNITQ)ₜ₁(PSSGAPPPS)ₜ₂-
(GGGGS)ₘ-X_{L}-(GGGGS)ₙ-
RPSGRKSSKMQAFRIWDVNQKTFYLRNNQLVAGYLQGPNVNLEEKIDVVPIEPHALFLGIHGGK
MCLSCVKSGDETRLQLEAVX_{IL84}ITDLSENRKQDKRFAFIRSDSGPTTSFESAAX_{IL116}PGWFLC
TAMEADQPVSLTNMPDEGVMVTKFYFQEDE;
or
(SEQ ID NO: 446)
U_{L}-X_{GI6}ISDYSIAMDKIHQQDFVNWLLAQK(GKKNDWKHNITQ)ₜ₁(PSSGAPPPS)ₜ₂-
(GGGGS)ₘ-X_{L}-(GGGGS)ₙ-
RPSGRKSSKMQAFRIWDVNQKTFYLRNNQLVAGYLQGPNVNLEEKIDVVPIEPHALFLGIHGGK
MCLSCVKSGDETRLQLEAVX_{IL84}ITDLSENRKQDKRFAFIRSDSGPTTSFESAAX_{IL116}PGWFLC
TAMEADQPVSLTNMPDEGVMVTKFYFQEDE;
or
(SEQ ID NO: 454)
U_{L}-
X_{IL0}RPSGRKSSKMQAFRIWDVNQKTFYLRNNQLVAGYLQGPNVNLEEKIDVVPIEPHALFLGIH
GGKMCLSCVKSGDETRLQLEAVNITDLSENRKQDKRFAFIRSDSGPTTSFESAAC
(linking group - GIP receptor binding polypeptide)
PGWFLCTAMEADQPVSLTNMPDEGVMVTKFYF QEDE;
or
(SEQ ID NO: 455)
U_{L}-
X_{IL0}RPSGRKSSKMQAFRIWDVNQKTFYLRNNQLVAGYLQGPNVNLEEKIDVVPIEPHALFLGIH
GGKMCLSCVKSGDETRLQLEAVC(linking group - GIP receptor
binding polypeptide)
ITDLSENRKQDKRFAFIRSDSGPTTSFESAASPGWFLCTAMEADQPVSLTNMPDEGVMVTKFYF
QEDE;
or
(SEQ ID NO: 497)
(GIP receptor binding polypeptide-linking group)-CIL0-
X_{IL0}RPSGRKSSKMQAFRIWDVNQKTFYLRNNQLVAGYLQGPNVNLEEKIDVVPIEPHALFLGIH
GGKMCLSCVKSGDETRLQLEAVX_{IL84}ITDLSENRKQDKRFAFIRSDSGPTTSFESAAX_{IL116}PGW
FLCTAMEADQPVSLTNMPDEGVMVTKFYFQEDE;
or
(SEQ ID NO: 498)
U_{L}-
X_{IL0}RPSGRKSSKMQAFRIWDVNQKTFYLRNNQLVAGYLQGPNVNLEEKIDVVPIEPHALFLGIH
GGKMCLSCVKSGDETRLQLEAVX_{IL84}ITDLSENRKQDKRFAFIRSDSGPTTSFESAAX_{IL116}PGW
FLCTAMEADQPVSLINMPDEGVMVITFYFQEDE_{CIL153}(linking group - GIP
receptor binding polypeptide);
wherein m and n are each 0, 1, 2, 3, 4, 5, or 6; t0, t1, and t2 are each 0 or 1; C_{IL0} is a cysteine or absent; C_{IL153} is a cysteine or absent; preferably, wherein said fusion protein is selected from the compounds GI-1 to GI-30.

18. (canceled)

19. A protein conjugate, wherein said protein conjugate is a compound obtained through modifications such as acylation, grafting, etc on the basis of the fusion protein of claim 1.

20. A pharmaceutical composition comprising the fusion protein of claim 1 or the protein conjugate thereof, as well as pharmaceutically acceptable carriers or additives.

21-22. (canceled)

23. A method of treating diabetes, comprising administering to a patient in need the fusion protein of claim 1, the protein conjugate thereof, or the pharmaceutical composition thereof.

The application's sequence listing, which the Patent Office published only in electronic form, follows.

SEQUENCE LISTING (514 sequences)

SEQ ID NO: 1 - protein, 191 aa, Artificial Sequence
  Description of Artificial Sequence: Synthetic fusion protein G-1
HGEGTFTSDLSKQMEEEAVRLFIEWLKNGGPSSGAPPPSRPSGRKSSKMQAFRIWDVNQKTFYLRNNQLVAGYLQGPNVNLEEKIDVVPIEPHALFLGIHGGKMCLSCVKSGDETRLQLEAVNITDLSENRKQDKRFAFIRSDSGPTTSFESAACPGWFLCTAMEADQPVSLTNMPDEGVMVTKFYFQEDE

SEQ ID NO: 2 - protein, 196 aa, Artificial Sequence
  Description of Artificial Sequence: Synthetic fusion protein G-2
HGEGTFTSDLSKQMEEEAVRLFIEWLKNGGPSSGAPPPSGGGGSRPSGRKSSKMQAFRIWDVNQKTFYLRNNQLVAGYLQGPNVNLEEKIDVVPIEPHALFLGIHGGKMCLSCVKSGDETRLQLEAVNITDLSENRKQDKRFAFIRSDSGPTTSFESAACPGWFLCTAMEADQPVSLTNMPDEGVMVTKFYFQEDE

SEQ ID NO: 3 - protein, 201 aa, Artificial Sequence
  Description of Artificial Sequence: Synthetic fusion protein G-3
HGEGTFTSDLSKQMEEEAVRLFIEWLKNGGPSSGAPPPSGGGGSGGGGSRPSGRKSSKMQAFRIWDVNQKTFYLRNNQLVAGYLQGPNVNLEEKIDVVPIEPHALFLGIHGGKMCLSCVKSGDETRLQLEAVNITDLSENRKQDKRFAFIRSDSGPTTSFESAACPGWFLCTAMEADQPVSLTNMPDEGVMVTKFYFQEDE

SEQ ID NO: 4 - protein, 206 aa, Artificial Sequence
  Description of Artificial Sequence: Synthetic fusion protein G-4
HGEGTFTSDLSKQMEEEAVRLFIEWLKNGGPSSGAPPPSGGGGSGGGGSGGGGSRPSGRKSSKMQAFRIWDVNQKTFYLRNNQLVAGYLQGPNVNLEEKIDVVPIEPHALFLGIHGGKMCLSCVKSGDETRLQLEAVNITDLSENRKQDKRFAFIRSDSGPTTSFESAACPGWFLCTAMEADQPVSLTNMPDEGVMVTKFYFQEDE

SEQ ID NO: 5 - protein, 182 aa, Artificial Sequence
  Description of Artificial Sequence: Synthetic fusion protein G-5
HGEGTFTSDLSKQMEEEAVRLFIEWLKNGGRPSGRKSSKMQAFRIWDVNQKTFYLRNNQLVAGYLQGPNVNLEEKIDVVPIEPHALFLGIHGGKMCLSCVKSGDETRLQLEAVNITDLSENRKQDKRFAFIRSDSGPTTSFESAACPGWFLCTAMEADQPVSLTNMPDEGVMVTKFYFQEDE

SEQ ID NO: 6 - protein, 185 aa, Artificial Sequence
  Description of Artificial Sequence: Synthetic fusion protein G-6
HGEGTFTSDLSKQMEEEAVRLFIEWLKNGGGGSRPSGRKSSKMQAFRIWDVNQKTFYLRNNQLVAGYLQGPNVNLEEKIDVVPIEPHALFLGIHGGKMCLSCVKSGDETRLQLEAVNITDLSENRKQDKRFAFIRSDSGPTTSFESAACPGWFLCTAMEADQPVSLTNMPDEGVMVTKFYFQEDE

SEQ ID NO: 7 - protein, 190 aa, Artificial Sequence
  Description of Artificial Sequence: Synthetic fusion protein G-7
HGEGTFTSDLSKQMEEEAVRLFIEWLKNGGGGSGGGGSRPSGRKSSKMQAFRIWDVNQKTFYLRNNQLVAGYLQGPNVNLEEKIDVVPIEPHALFLGIHGGKMCLSCVKSGDETRLQLEAVNITDLSENRKQDKRFAFIRSDSGPTTSFESAACPGWFLCTAMEADQPVSLTNMPDEGVMVTKFYFQEDE

SEQ ID NO: 8 - protein, 195 aa, Artificial Sequence
  Description of Artificial Sequence: Synthetic fusion protein G-8
HGEGTFTSDLSKQMEEEAVRLFIEWLKNGGGGSGGGGSGGGGSRPSGRKSSKMQAFRIWDVNQKTFYLRNNQLVAGYLQGPNVNLEEKIDVVPIEPHALFLGIHGGKMCLSCVKSGDETRLQLEAVNITDLSENRKQDKRFAFIRSDSGPTTSFESAACPGWFLCTAMEADQPVSLTNMPDEGVMVTKFYFQEDE

SEQ ID NO: 9 - protein, 196 aa, Artificial Sequence; identical to SEQ ID NO: 2
  Description of Artificial Sequence: Synthetic fusion protein G-9
  MOD_RES (160)..(160): S-maleimide-(CH2)4-NH-(Nalpha-(HOOC(CH2)14CO)-gamma-Glu), S is the sulphur atom on the side chain of a cysteine residue

SEQ ID NO: 10 - protein, 196 aa, Artificial Sequence
  Description of Artificial Sequence: Synthetic fusion protein G-10
  MOD_RES (128)..(128): S-CH2-CONH-PEG20K,S is the sulphur atom on the side chain of a cysteine residue
HGEGTFTSDLSKQMEEEAVRLFIEWLKNGGPSSGAPPPSGGGGSRPSGRKSSKMQAFRIWDVNQKTFYLRNNQLVAGYLQGPNVNLEEKIDVVPIEPHALFLGIHGGKMCLSCVKSGDETRLQLEAVCITDLSENRKQDKRFAFIRSDSGPTTSFESAASPGWFLCTAMEADQPVSLTNMPDEGVMVTKFYFQEDE

SEQ ID NO: 11 - protein, 191 aa, Artificial Sequence
  Description of Artificial Sequence: Synthetic fusion protein G-11
  MOD_RES (155)..(155): S-CH2-CONH-PEG20K,S is the sulphur atom on the side chain of a cysteine residue
HGEGTFTSDLSKQMEEEAVRLFIEWLKNGGGGGSGGGGSRPSGRKSSKMQAFRIWDVNQKTFYLRNNQLVAGYLQGPNVNLEEKIDVVPIEPHALFLGIHGGKMCLSCVKSGDETRLQLEAVNITDLSENRKQDKRFAFIRSDSGPTTSFESAACPGWFLCTAMEADQPVSLTNMPDEGVMVTKFYFQEDE

SEQ ID NO: 12 - protein, 201 aa, Artificial Sequence
  Description of Artificial Sequence: Synthetic fusion protein G-12
  MOD_RES (133)..(133): S-maleimide-(CH2)4-NH-(Nalpha-(HOOC(CH2)14CO)-gamma-Glu), S is the sulphur atom on the side chain of a cysteine residue
HGEGTFTSDLSKQMEEEAVRLFIEWLKNGGPSSGAPPPSGGGGSGGGGSRPSGRKSSKMQAFRIWDVNQKTFYLRNNQLVAGYLQGPNVNLEEKIDVVPIEPHALFLGIHGGKMCLSCVKSGDETRLQLEAVCITDLSENRKQDKRFAFIRSDSGPTTSFESAASPGWFLCTAMEADQPVSLTNMPDEGVMVTKFYFQEDE

SEQ ID NO: 13 - protein, 185 aa, Artificial Sequence; identical to SEQ ID NO: 6
  Description of Artificial Sequence: Synthetic fusion protein G-13
  MOD_RES (149)..(149): S-maleimide-PEG20K, S is the sulphur atom on the side chain of a cysteine residue

SEQ ID NO: 14 - protein, 185 aa, Artificial Sequence
  Description of Artificial Sequence: Synthetic fusion protein G-14
  MOD_RES (117)..(117): S-maleimide-(CH2)4-NH-(Nalpha-(HOOC(CH2)14CO)-gamma-Glu), S is the sulphur atom on the side chain of a cysteine residue
HGEGTFTSDLSKQMEEEAVRLFIEWLKNGGGGSRPSGRKSSKMQAFRIWDVNQKTFYLRNNQLVAGYLQGPNVNLEEKIDVVPIEPHALFLGIHGGKMCLSCVKSGDETRLQLEAVCITDLSENRKQDKRFAFIRSDSGPTTSFESAASPGWFLCTAMEADQPVSLTNMPDEGVMVTKFYFQEDE

SEQ ID NO: 15 - protein, 201 aa, Artificial Sequence
  Description of Artificial Sequence: Synthetic fusion protein G-15
  MOD_RES (27)..(27): S-maleimide-(CH2)4-NH-(Nalpha-(HOOC(CH2)14CO) -gamma-Glu), S is the sulphur atom on the side chain of a cysteine residue
HGEGTFTSDLSKQMEEEAVRLFIEWLCNGGPSSGAPPPSGGGGSGGGGSRPSGRKSSKMQAFRIWDVNQKTFYLRNNQLVAGYLQGPNVNLEEKIDVVPIEPHALFLGIHGGKMCLSCVKSGDETRLQLEAVNITDLSENRKQDKRFAFIRSDSGPTTSFESAASPGWFLCTAMEADQPVSLTNMPDEGVMVTKFYFQEDE

SEQ ID NO: 16 - protein, 201 aa, Artificial Sequence
  Description of Artificial Sequence: Synthetic fusion protein G-16
  MOD_RES (39)..(39): S-CH2-CONH- PEG20K,S is the sulphur atom on the side chain of a cysteine residue
HGEGTFTSDLSKQMEEEAVRLFIEWLKNGGPSSGAPPPCGGGGSGGGGSRPSGRKSSKMQAFRIWDVNQKTFYLRNNQLVAGYLQGPNVNLEEKIDVVPIEPHALFLGIHGGKMCLSCVKSGDETRLQLEAVNITDLSENRKQDKRFAFIRSDSGPTTSFESAASPGWFLCTAMEADQPVSLTNMPDEGVMVTKFYFQEDE

SEQ ID NO: 17 - protein, 201 aa, Artificial Sequence
  Description of Artificial Sequence: Synthetic fusion protein G-17
  MOD_RES (20)..(20): S-maleimide-(CH2)4-NH-(Nalpha-(HOOC(CH2)14CO)-gamma-Glu), S is the sulphur atom on the side chain of a cysteine residue
HGEGTFTSDLSKQMEEEAVCLFIEWLKNGGPSSGAPPPSGGGGSGGGGSRPSGRKSSKMQAFRIWDVNQKTFYLRNNQLVAGYLQGPNVNLEEKIDVVPIEPHALFLGIHGGKMCLSCVKSGDETRLQLEAVNITDLSENRKQDKRFAFIRSDSGPTTSFESAASPGWFLCTAMEADQPVSLTNMPDEGVMVTKFYFQEDE

SEQ ID NO: 18 - protein, 183 aa, Artificial Sequence
  Description of Artificial Sequence: Synthetic fusion protein G-18
HGEGTFTSDVSSYLEEQAAKEFIAWLVKGRGRPSGRKSSKMQAFRIWDVNQKTFYLRNNQLVAGYLQGPNVNLEEKIDVVPIEPHALFLGIHGGKMCLSCVKSGDETRLQLEAVNITDLSENRKQDKRFAFIRSDSGPTTSFESAACPGWFLCTAMEADQPVSLTNMPDEGVMVTKFYFQEDE

SEQ ID NO: 19 - protein, 187 aa, Artificial Sequence
  Description of Artificial Sequence: Synthetic fusion protein G-19
HGEGTFTSDVSSYLEEQAAKEFIAWLVKGRGGGGSRPSGRKSSKMQAFRIWDVNQKTFYLRNNQLVAGYLQGPNVNLEEKIDVVPIEPHALFLGIHGGKMCLSCVKSGDETRLQLEAVNITDLSENRKQDKRFAFIRSDSGPTTSFESAACPGWFLCTAMEADQPVSLTNMPDEGVMVTKFYFQEDE

SEQ ID NO: 20 - protein, 192 aa, Artificial Sequence
  Description of Artificial Sequence: Synthetic fusion protein G-20
HGEGTFTSDVSSYLEEQAAKEFIAWLVKGRGGGGSGGGGSRPSGRKSSKMQAFRIWDVNQKTFYLRNNQLVAGYLQGPNVNLEEKIDVVPIEPHALFLGIHGGKMCLSCVKSGDETRLQLEAVNITDLSENRKQDKRFAFIRSDSGPTTSFESAACPGWFLCTAMEADQPVSLTNMPDEGVMVTKFYFQEDE

SEQ ID NO: 21 - protein, 197 aa, Artificial Sequence
  Description of Artificial Sequence: Synthetic fusion protein G-21
HGEGTFTSDVSSYLEEQAAKEFIAWLVKGRGGGGSGGGGSGGGGSRPSGRKSSKMQAFRIWDVNQKTFYLRNNQLVAGYLQGPNVNLEEKIDVVPIEPHALFLGIHGGKMCLSCVKSGDETRLQLEAVNITDLSENRKQDKRFAFIRSDSGPTTSFESAACPGWFLCTAMEADQPVSLTNMPDEGVMVTKFYFQEDE

SEQ ID NO: 22 - protein, 201 aa, Artificial Sequence
  Description of Artificial Sequence: Synthetic fusion protein G-22
HGEGTFTSDVSSYLEEQAAKEFIAWLVKGRPSSGAPPPSGGGGSGGGGSRPSGRKSSKMQAFRIWDVNQKTFYLRNNQLVAGYLQGPNVNLEEKIDVVPIEPHALFLGIHGGKMCLSCVKSGDETRLQLEAVNITDLSENRKQDKRFAFIRSDSGPTTSFESAACPGWFLCTAMEADQPVSLTNMPDEGVMVTKFYFQEDE

SEQ ID NO: 23 - protein, 183 aa, Artificial Sequence; identical to SEQ ID NO: 18
  Description of Artificial Sequence: Synthetic fusion protein G-23
  MOD_RES (147)..(147): S-CH2-CONH-PEG20K,S is the sulphur atom on the side chain of a cysteine residue

SEQ ID NO: 24 - protein, 187 aa, Artificial Sequence; identical to SEQ ID NO: 19
  Description of Artificial Sequence: Synthetic fusion protein G-24
  MOD_RES (151)..(151): S-CH2-CONH-PEG20K,S is the sulphur atom on the side chain of a cysteine residue

SEQ ID NO: 25 - protein, 187 aa, Artificial Sequence
  Description of Artificial Sequence: Synthetic fusion protein G-25
  MOD_RES (119)..(119): S-maleimide-(CH2)4-NH-(Nalpha-(HOOC(CH2)14CO)-gamma-Glu), S is the sulphur atom on the side chain of a cysteine residue
HGEGTFTSDVSSYLEEQAAKEFIAWLVKGRGGGGSRPSGRKSSKMQAFRIWDVNQKTFYLRNNQLVAGYLQGPNVNLEEKIDVVPIEPHALFLGIHGGKMCLSCVKSGDETRLQLEAVCITDLSENRKQDKRFAFIRSDSGPTTSFESAASPGWFLCTAMEADQPVSLTNMPDEGVMVTKFYFQEDE

SEQ ID NO: 26 - protein, 192 aa, Artificial Sequence; identical to SEQ ID NO: 20
  Description of Artificial Sequence: Synthetic fusion protein G-26
  MOD_RES (156)..(156): S-CH2-CONH-PEG20K,S is the sulphur atom on the side chain of a cysteine residue

SEQ ID NO: 27 - protein, 192 aa, Artificial Sequence
  Description of Artificial Sequence: Synthetic fusion protein G-27
  MOD_RES (124)..(124): S-maleimide-(CH2)4-NH-(Nalpha-(HOOC(CH2)14CO)-gamma-Glu), S is the sulphur atom on the side chain of a cysteine residue
HGEGTFTSDVSSYLEEQAAKEFIAWLVKGRGGGGSGGGGSRPSGRKSSKMQAFRIWDVNQKTFYLRNNQLVAGYLQGPNVNLEEKIDVVPIEPHALFLGIHGGKMCLSCVKSGDETRLQLEAVCITDLSENRKQDKRFAFIRSDSGPTTSFESAASPGWFLCTAMEADQPVSLTNMPDEGVMVTKFYFQEDE

SEQ ID NO: 28 - protein, 197 aa, Artificial Sequence; identical to SEQ ID NO: 21
  Description of Artificial Sequence: Synthetic fusion protein G-28
  MOD_RES (161)..(161): S-CH2-CONH-PEG20K,S is the sulphur atom on the side chain of a cysteine residue

SEQ ID NO: 29 - protein, 201 aa, Artificial Sequence; identical to SEQ ID NO: 22
  Description of Artificial Sequence: Synthetic fusion protein G-29
  MOD_RES (165)..(165): S-maleimide-(CH2)4-NH-(Nalpha-(HOOC(CH2)14CO)-gamma-Glu), S is the sulphur atom on the side chain of a cysteine residue

SEQ ID NO: 30 - protein, 201 aa, Artificial Sequence; identical to SEQ ID NO: 16
  Description of Artificial Sequence: Synthetic fusion protein G-30
  MOD_RES (39)..(39): S-maleimide-(CH2)15-COOH,S is the sulphur atom on the side chain of a cysteine residue

SEQ ID NO: 31 - protein, 201 aa, Artificial Sequence; identical to SEQ ID NO: 16
  Description of Artificial Sequence: Synthetic fusion protein G-31
  MOD_RES (39)..(39): S-maleimide-(CH2)17-COOH, S is the sulphur atom on the side chain of a cysteine residue

SEQ ID NO: 32 - protein, 201 aa, Artificial Sequence; identical to SEQ ID NO: 16
  Description of Artificial Sequence: Synthetic fusion protein G-32
  MOD_RES (39)..(39): S-CH2-CONH-(CH2CH2O)2-(CH2)2-NH-(Nalpha-(HOOC(CH2)14CO)- gamma-Glu),S is the sulphur atom on the side chain of a cysteine residue

SEQ ID NO: 33 - protein, 201 aa, Artificial Sequence; identical to SEQ ID NO: 15
  Description of Artificial Sequence: Synthetic fusion protein G-33
  MOD_RES (27)..(27): S-CH2-CONH-(CH2CH2O)2-(CH2)2-NH-(Nalpha- (HOOC(CH2)14CO)-gamma-Glu),S is the sulphur atom on the side chain of a cysteine residue

SEQ ID NO: 34 - protein, 201 aa, Artificial Sequence; identical to SEQ ID NO: 17
  Description of Artificial Sequence: Synthetic fusion protein G-34
  MOD_RES (20)..(20): S-CH2-CONH-(CH2CH2O)2-(CH2)2-NH-(Nalpha-(HOOC(CH2)14 CO)-gamma-Glu),S is the sulphur atom on the side chain of a cysteine residue

SEQ ID NO: 35 - protein, 201 aa, Artificial Sequence
  Description of Artificial Sequence: Synthetic fusion protein G-35
  MOD_RES (32)..(32): S-CH2-CONH-(CH2CH2O)2-(CH2)2-NH-(Nalpha-(HOOC(CH2)14CO)- gamma-Glu),S is the sulphur atom on the side chain of a cysteine residue
HGEGTFTSDLSKQMEEEAVRLFIEWLKNGGPCSGAPPPSGGGGSGGGGSRPSGRKSSKMQAFRIWDVNQKTFYLRNNQLVAGYLQGPNVNLEEKIDVVPIEPHALFLGIHGGKMCLSCVKSGDETRLQLEAVNITDLSENRKQDKRFAFIRSDSGPTTSFESAASPGWFLCTAMEADQPVSLTNMPDEGVMVTKFYFQEDE

SEQ ID NO: 36 - protein, 201 aa, Artificial Sequence; identical to SEQ ID NO: 12
  Description of Artificial Sequence: Synthetic fusion protein G-36
  MOD_RES (133)..(133): S-maleimide-(CH2)15-COOH,S is the sulphur atom on the side chain of a cysteine residue

SEQ ID NO: 37 - protein, 201 aa, Artificial Sequence; identical to SEQ ID NO: 12
  Description of Artificial Sequence: Synthetic fusion protein G-37
  MOD_RES (133)..(133): S-CH2-CONH-(CH2CH2O)2-(CH2)2-NH-(Nalpha-(HOOC(CH2)14CO)- gamma-Glu),S is the sulphur atom on the side chain of a cysteine residue

SEQ ID NO: 38 - protein, 201 aa, Artificial Sequence; identical to SEQ ID NO: 3
  Description of Artificial Sequence: Synthetic fusion protein G-38
  MOD_RES (165)..(165): S-maleimide-(CH2)17-COOH,S is the sulphur atom on the side chain of a cysteine residue

SEQ ID NO: 39 - protein, 201 aa, Artificial Sequence; identical to SEQ ID NO: 3
  Description of Artificial Sequence: Synthetic fusion protein G-39
  MOD_RES (165)..(165): S-CH2-CONH-(CH2CH2O)4-(CH2)2-NH-(Nalpha-(HOOC(CH2)16CO) -gamma-Glu),S is the sulphur atom on the side chain of a cysteine residue

SEQ ID NO: 40 - protein, 193 aa, Artificial Sequence
  Description of Artificial Sequence: Synthetic fusion protein G-40
  MOD_RES (31)..(31): S-maleimide-(CH2)15-COOH,S is the sulphur atom on the side chain of a cysteine residue
HGEGTFTSDVSSYLEEQAAKEFIAWLVKGRCGGGGSGGGGSRPSGRKSSKMQAFRIWDVNQKTFYLRNNQLVAGYLQGPNVNLEEKIDVVPIEPHALFLGIHGGKMCLSCVKSGDETRLQLEAVNITDLSENRKQDKRFAFIRSDSGPTTSFESAASPGWFLCTAMEADQPVSLTNMPDEGVMVTKFYFQEDE

SEQ ID NO: 41 - protein, 193 aa, Artificial Sequence; identical to SEQ ID NO: 40
  Description of Artificial Sequence: Synthetic fusion protein G-41
  MOD_RES (31)..(31): S-CH2-CONH-(CH2CH2O)2-(CH2)2-NH-(Nalpha- (HOOC(CH2)14CO)-gamma-Glu),S is the sulphur atom on the side chain of a cysteine residue

SEQ ID NO: 42 - protein, 192 aa, Artificial Sequence; identical to SEQ ID NO: 27
  Description of Artificial Sequence: Synthetic fusion protein G-42
  MOD_RES (124)..(124): S-maleimide-(CH2)17-COOH,S is the sulphur atom on the side chain of a cysteine residue

SEQ ID NO: 43 - protein, 192 aa, Artificial Sequence
  Description of Artificial Sequence: Synthetic fusion protein G-43
  MOD_RES (20)..(20): S-CH2-CONH-(CH2CH2O)2-(CH2)2-NH-(Nalpha-(HOOC(CH2)14CO) -gamma-Glu),S is the sulphur atom on the side chain of a cysteine residue
HGEGTFTSDVSSYLEEQAACEFIAWLVKGRGGGGSGGGGSRPSGRKSSKMQAFRIWDVNQKTFYLRNNQLVAGYLQGPNVNLEEKIDVVPIEPHALFLGIHGGKMCLSCVKSGDETRLQLEAVNITDLSENRKQDKRFAFIRSDSGPTTSFESAASPGWFLCTAMEADQPVSLTNMPDEGVMVTKFYFQEDE

SEQ ID NO: 44 - protein, 192 aa, Artificial Sequence
  Description of Artificial Sequence: Synthetic fusion protein G-44
  MOD_RES (20)..(20): S-CH2-CONH-(CH2CH2O)2-(CH2)2-NH-(Nalpha-(HOOC(CH2)14CO) -gamma-Glu),S is the sulphur atom on the side chain of a cysteine residue
HAEGTFTSDVSSYLEGQAACEFIAWLVKGRGGGGSGGGGSRPSGRKSSKMQAFRIWDVNQKTFYLRNNQLVAGYLQGPNVNLEEKIDVVPIEPHALFLGIHGGKMCLSCVKSGDETRLQLEAVNITDLSENRKQDKRFAFIRSDSGPTTSFESAASPGWFLCTAMEADQPVSLTNMPDEGVMVTKFYFQEDE

SEQ ID NO: 45 - protein, 192 aa, Artificial Sequence
  Description of Artificial Sequence: Synthetic fusion protein G-45
  MOD_RES (10)..(10): S-CH2-CONH-(CH2CH2O)2-(CH2)2-NH-(Nalpha-(HOOC(CH2)14CO- gamma-Glu-N-gamma-Glu),S is the sulphur atom on the side chain of a cysteine residue
HGEGTFTSDCSSYLEEQAAKEFIAWLVKGRGGGGSGGGGSRPSGRKSSKMQAFRIWDVNQKTFYLRNNQLVAGYLQGPNVNLEEKIDVVPIEPHALFLGIHGGKMCLSCVKSGDETRLQLEAVNITDLSENRKQDKRFAFIRSDSGPTTSFESAASPGWFLCTAMEADQPVSLTNMPDEGVMVTKFYFQEDE

SEQ ID NO: 46 - protein, 192 aa, Artificial Sequence
  Description of Artificial Sequence: Synthetic fusion protein G-46
  MOD_RES (10)..(10): S-CH2-CONH-(CH2CH2O)2-(CH2)2-NH-(Nalpha-(HOOC(CH2)14CO) -gamma-Glu),S is the sulphur atom on the side chain of a cysteine residue
HAEGTFTSDCSSYLEGQAAKEFIAWLVKGRGGGGSGGGGSRPSGRKSSKMQAFRIWDVNQKTFYLRNNQLVAGYLQGPNVNLEEKIDVVPIEPHALFLGIHGGKMCLSCVKSGDETRLQLEAVNITDLSENRKQDKRFAFIRSDSGPTTSFESAASPGWFLCTAMEADQPVSLTNMPDEGVMVTKFYFQEDE

SEQ ID NO: 47 - protein, 192 aa, Artificial Sequence
  Description of Artificial Sequence: Synthetic fusion protein G-47
  MOD_RES (28)..(28): S-CH2-CONH-(CH2CH2O)2-(CH2)2-NH-(Nalpha-(HOOC(CH2)14CO)- gamma-Glu),S is the sulphur atom on the side chain of a cysteine residue
HGEGTFTSDVSSYLEEQAAKEFIAWLVCGRGGGGSGGGGSRPSGRKSSKMQAFRIWDVNQKTFYLRNNQLVAGYLQGPNVNLEEKIDVVPIEPHALFLGIHGGKMCLSCVKSGDETRLQLEAVNITDLSENRKQDKRFAFIRSDSGPTTSFESAASPGWFLCTAMEADQPVSLTNMPDEGVMVTKFYFQEDE

SEQ ID NO: 48 - protein, 192 aa, Artificial Sequence; identical to SEQ ID NO: 27
  Description of Artificial Sequence: Synthetic fusion protein G-48
  MOD_RES (124)..(124): S-CH2-CONH-(CH2CH2O)4-(CH2)2-NH-(Nalpha-(HOOC(CH2)16CO)- gamma-Glu),S is the sulphur atom on the side chain of a cysteine residue

SEQ ID NO: 49 - protein, 192 aa, Artificial Sequence; identical to SEQ ID NO: 20
  Description of Artificial Sequence: Synthetic fusion protein G-49
  MOD_RES (156)..(156): S-maleimide-(CH2)15-COOH,S is the sulphur atom on the side chain of a cysteine residue

SEQ ID NO: 50 - protein, 192 aa, Artificial Sequence; identical to SEQ ID NO: 20
  Description of Artificial Sequence: Synthetic fusion protein G-50
  MOD_RES (156)..(156): S-CH2-CONH-(CH2CH2O)2-(CH2)2-NH-(Nalpha-(HOOC(CH2)14CO)- gamma-Glu),S is the sulphur atom on the side chain of a cysteine residue

SEQ ID NO: 51 - protein, 152 aa, Artificial Sequence
  Description of Artificial Sequence: Synthetic fusion protein G-51
  MOD_RES (84)..(84): S-maleimide-PEG11-maleimide-S-GLP-1 receptor binding polypeptide,S is the sulphur atom on the side chain of a cysteine residue;wherein the GLP-1 receptor binding polypeptide has the following sequence of SEQ ID NO:185
  MOD_RES (84)..(84): and is linked to the interleukin-1 receptor antagonistic protein by reacting the mercapto group on the side chain of a terminal cysteine residue with the maleimide
RPSGRKSSKMQAFRIWDVNQKTFYLRNNQLVAGYLQGPNVNLEEKIDVVPIEPHALFLGIHGGKMCLSCVKSGDETRLQLEAVCITDLSENRKQDKRFAFIRSDSGPTTSFESAASPGWFLCTAMEADQPVSLTNMPDEGVMVTKFYFQEDE

SEQ ID NO: 52 - protein, 152 aa, Artificial Sequence
  Description of Artificial Sequence: Synthetic fusion protein G-52
  MOD_RES (116)..(116): S-maleimide-PEG11-maleimide-S-GLP-1 receptor binding polypeptide,S is the sulphur atom on the side chain of a cysteine residue,wherein the GLP-1 receptor binding polypeptide has the sequence of SEQ ID NO: 185 and is
  MOD_RES (116)..(116): linked to the interleukin-1 receptor antagonistic protein by reacting the mercapto group on the side chain of a terminal cysteine residue with the maleimide;
RPSGRKSSKMQAFRIWDVNQKTFYLRNNQLVAGYLQGPNVNLEEKIDVVPIEPHALFLGIHGGKMCLSCVKSGDETRLQLEAVNITDLSENRKQDKRFAFIRSDSGPTTSFESAACPGWFLCTAMEADQPVSLTNMPDEGVMVTKFYFQEDE

SEQ ID NO: 53 - protein, 152 aa, Artificial Sequence; identical to SEQ ID NO: 51
  Description of Artificial Sequence: Synthetic fusion protein G-53
  MOD_RES (84)..(84): S-maleimide-PEG11-maleimide-S-GLP-1 receptor binding polypeptide,S is the sulphur atom on the side chain of a cysteine residue,wherein the GLP-1 receptor binding polypeptide has the following sequence of
  MOD_RES (84)..(84): SEQ ID NO:186 and is linked to the interleukin-1 receptor antagonistic protein by reacting the mercapto group on the side chain of a terminal cysteine residue with the maleimide;

SEQ ID NO: 54 - protein, 152 aa, Artificial Sequence; identical to SEQ ID NO: 52
  Description of Artificial Sequence: Synthetic fusion protein G-54
  MOD_RES (116)..(116): S-maleimide-PEG11-maleimide-S-GLP-1 receptor binding polypeptide,S is the sulphur atom on the side chain of a cysteine residue,wherein the the GLP-1 receptor
  MOD_RES (116)..(116): binding polypeptide has the sequence of SEQ ID NO: 186 and is linked to the interleukin-1 receptor antagonistic protein by reacting the mercapto group on the side chain of a terminal cysteine residue with the maleimide;

SEQ ID NO: 55 - protein, 152 aa, Artificial Sequence; identical to SEQ ID NO: 51
  Description of Artificial Sequence: Synthetic fusion protein G-55
  MOD_RES (84)..(84): S-maleimide-PEG11-maleimide-S-GLP-1 receptor binding polypeptide,S is the sulphur atom on the side chain of a cysteine residue, wherein the GLP-1 receptor binding polypeptide has the following sequence of
  MOD_RES (84)..(84): SEQ ID NO:187 and is linked to the interleukin-1 receptor antagonistic protein by reacting the mercapto group on the side chain of a cysteine residue with the maleimide

SEQ ID NO: 56 - protein, 152 aa, Artificial Sequence; identical to SEQ ID NO: 52
  Description of Artificial Sequence: Synthetic fusion protein G-56
  MOD_RES (116)..(116): S-maleimide-PEG11-maleimide-S-GLP-1 receptor binding polypeptide,S is the sulphur atom on the side chain of a cysteine residue,wherein the GLP-1 receptor binding polypeptide has the sequence of SEQ ID NO:187 and is
  MOD_RES (116)..(116): linked to the interleukin-1 receptor antagonistic protein by reacting the mercapto group on the side chain of a cysteine residue with the maleimide

SEQ ID NO: 57 - protein, 152 aa, Artificial Sequence; identical to SEQ ID NO: 51
  Description of Artificial Sequence: Synthetic fusion protein G-57
  MOD_RES (84)..(84): S-maleimide-PEG11-maleimide-S-GLP-1 receptor binding polypeptide,S is the sulphur atom on the side chain of a cysteine residue,wherein the GLP-1 receptor binding polypeptide has the following sequence of SEQ ID
  MOD_RES (84)..(84): NO:188 and is linked to the interleukin-1 receptor antagonistic protein by reacting the mercapto group on the side chain of a cysteine residue with the maleimide

SEQ ID NO: 58 - protein, 152 aa, Artificial Sequence; identical to SEQ ID NO: 52
  Description of Artificial Sequence: Synthetic fusion protein G-58
  MOD_RES (116)..(116): S-maleimide-PEG11-maleimide-S-GLP-1 receptor binding polypeptide, S is the sulphur atom on the side chain of a cysteine residue, wherein the the GLP-1 receptor binding polypeptide has the sequence of SEQ ID NO: 188
  MOD_RES (116)..(116): and is linked to the interleukin-1 receptor antagonistic protein by reacting the mercapto group on the side chain of a cysteine residue with the maleimide

SEQ ID NO: 59 - protein, 152 aa, Artificial Sequence; identical to SEQ ID NO: 51
  Description of Artificial Sequence: Synthetic fusion protein G-59
  MOD_RES (84)..(84): S-maleimide-PEG20K-maleimide-S-GLP-1 receptor binding polypeptide,S is the sulphur atom on the side chain of a cysteine residue,wherein the GLP-1 receptor binding polypeptide has the sequence of SEQ ID NO: 185 and is
  MOD_RES (84)..(84): linked to the interleukin-1 receptor antagonistic protein by reacting the mercapto group on the side chain of a terminal cysteine residue with the maleimide

SEQ ID NO: 60 - protein, 152 aa, Artificial Sequence; identical to SEQ ID NO: 52
  Description of Artificial Sequence: Synthetic fusion protein G-60
  MOD_RES (116)..(116): S-maleimide-PEG20K-maleimide-S-GLP-1 receptor binding polypeptide,S is the sulphur atom on the side chain of a cysteine residue,wherein the GLP-1 receptor binding polypeptide has the sequence of SEQ ID NO: 185 and is
  MOD_RES (116)..(116): linked to the interleukin-1 receptor antagonistic protein by reacting the mercapto group on the side chain of a terminal cysteine residue with the maleimide

SEQ ID NO: 61 - protein, 152 aa, Artificial Sequence; identical to SEQ ID NO: 51
  Description of Artificial Sequence: Synthetic fusion protein G-61
  MOD_RES (84)..(84): S-maleimide-PEG20K-maleimide-S-GLP-1 receptor binding polypeptide,S is the sulphur atom on the side chain of a cysteine residue,wherein the GLP-1 receptor binding polypeptide has the following sequence of SEQ ID NO:189
  MOD_RES (84)..(84): and is linked to the interleukin-1 receptor antagonistic protein by reacting the mercapto group on the side chain of a terminal cysteine residue with the maleimide

SEQ ID NO: 62 - protein, 152 aa, Artificial Sequence; identical to SEQ ID NO: 52
  Description of Artificial Sequence: Synthetic fusion protein G-62
  MOD_RES (116)..(116): S-maleimide-PEG20K-maleimide-S-GLP-1 receptor binding polypeptide,S is the sulphur atom on the side chain of a cysteine residue,wherein the GLP-1 receptor binding polypeptide has the sequence of SEQ ID NO: 186 and is
  MOD_RES (116)..(116): linked to the interleukin-1 receptor antagonistic protein by reacting the mercapto group on the side chain of a terminal cysteine residue with the maleimide

SEQ ID NO: 63 - protein, 152 aa, Artificial Sequence; identical to SEQ ID NO: 51
  Description of Artificial Sequence: Synthetic fusion protein G-63
  MOD_RES (84)..(84): S-maleimide-PEG20K-maleimide-S-GLP-1 receptor binding polypeptide,S is the sulphur atom on the side chain of a cysteine residue, wherein the GLP-1 receptor binding polypeptide has the sequence of SEQ ID NO: 187 and is
  MOD_RES (84)..(84): linked to the interleukin-1 receptor antagonistic protein by reacting the mercapto group on the side chain of a cysteine residue with the maleimide

SEQ ID NO: 64 - protein, 152 aa, Artificial Sequence; identical to SEQ ID NO: 52
  Description of Artificial Sequence: Synthetic fusion protein G-64
  MOD_RES (116)..(116): S-maleimide-PEG20K-maleimide-S-GLP-1 receptor binding polypeptide,S is the sulphur atom on the side chain of a cysteine residue,wherein the GLP-1 receptor binding polypeptide has the following sequence of SEQ ID NO:190
  MOD_RES (116)..(116): and is linked to the interleukin-1 receptor antagonistic protein by reacting the mercapto group on the side chain of a cysteine residue with the maleimide

SEQ ID NO: 65 - protein, 152 aa, Artificial Sequence; identical to SEQ ID NO: 51
  Description of Artificial Sequence: Synthetic fusion protein G-65
  MOD_RES (84)..(84): S-maleimide-PEG20K-maleimide-S-GLP-1 receptor binding polypeptide,S is the sulphur atom on the side chain of a cysteine residue, wherein the GLP-1 receptor binding polypeptide has the sequence of SEQ ID NO: 188 and is
  MOD_RES (84)..(84): linked to the interleukin-1 receptor antagonistic protein by reacting the mercapto group on the side chain of a cysteine residue with the maleimide

SEQ ID NO: 66 - protein, 152 aa, Artificial Sequence; identical to SEQ ID NO: 52
  Description of Artificial Sequence: Synthetic fusion protein G-66
  MOD_RES (116)..(116): S-maleimide-PEG20K-maleimide-S-GLP-1 receptor binding polypeptide,S is the sulphur atom on the side chain of a cysteine residue, wherein the GLP-1 receptor binding polypeptide has the sequence of SEQ ID NO: 188 and is
  MOD_RES (116)..(116): linked to the interleukin-1 receptor antagonistic protein by reacting the mercapto group on the side chain of a cysteine residue with the maleimide

SEQ ID NO: 67 - protein, 153 aa, Artificial Sequence
  Description of Artificial Sequence: Synthetic fusion protein G-67
  MOD_RES (1)..(1): GLP-1 receptor binding polypeptide-S-maleimide-PEG20K- maleimide-S,S is the sulphur atom on the side chain of a cysteine residu,wherein the GLP-1 receptor binding polypeptide has the sequence of SEQ ID NO: 185 and is
  MOD_RES (1)..(1): linked to the interleukin-1 receptor antagonistic protein by reacting the mercapto group on the side chain of a terminal cysteine residue with the maleimide
CRPSGRKSSKMQAFRIWDVNQKTFYLRNNQLVAGYLQGPNVNLEEKIDVVPIEPHALFLGIHGGKMCLSCVKSGDETRLQLEAVNITDLSENRKQDKRFAFIRSDSGPTTSFESAASPGWFLCTAMEADQPVSLTNMPDEGVMVTKFYFQEDE

SEQ ID NO: 68 - protein, 152 aa, Artificial Sequence; identical to SEQ ID NO: 52
  Description of Artificial Sequence: Synthetic fusion protein G-68
  MOD_RES (1)..(1): PEG20K
  MOD_RES (116)..(116): S-maleimide-PEG11-maleimide-S-GLP-1 receptor binding polypeptide,S is the sulphur atom on the side chain of a cysteine residue,wherein the GLP-1 receptor binding polypeptide has the sequence of SEQ ID NO: 185 and is
  MOD_RES (116)..(116): linked to the interleukin-1 receptor antagonistic protein by reacting the mercapto group on the side chain of a terminal cysteine residue with the maleimide

SEQ ID NO: 69 - protein, 152 aa, Artificial Sequence; identical to SEQ ID NO: 51
  Description of Artificial Sequence: Synthetic fusion protein G-69
  MOD_RES (1)..(1): PEG20K
  MOD_RES (84)..(84): S-maleimide-PEG11-maleimide-S-GLP-1 receptor binding polypeptide,S is the sulphur atom on the side chain of a cysteine residue,wherein the GLP-1 receptor binding polypeptide has the sequence of SEQ ID NO: 186 and is
  MOD_RES (84)..(84): linked to the interleukin-1 receptor antagonistic protein by reacting the mercapto group on the side chain of a terminal cysteine residue with the maleimide

SEQ ID NO: 70 - protein, 153 aa, Artificial Sequence; identical to SEQ ID NO: 67
  Description of Artificial Sequence: Synthetic fusion protein G-70
  MOD_RES (1)..(1): GLP-1 receptor binding polypeptide-S-maleimide-PEG20K- maleimide-S,S is the sulphur atom on the side chain of a cysteine residue, wherein the GLP-1 receptor binding polypeptide has the sequence of SEQ ID NO: 189 and is
  MOD_RES (1)..(1): linked to the interleukin-1 receptor antagonistic protein by reacting the mercapto group on the side chain of a terminal cysteine residue with the maleimide

SEQ ID NO: 71 - protein, 152 aa, Artificial Sequence; identical to SEQ ID NO: 51
  Description of Artificial Sequence: Synthetic fusion protein G-71
  MOD_RES (84)..(84): S-maleimide-PEG11-maleimide-S-GLP-1 receptor binding polypeptide,S is the sulphur atom on the side chain of a cysteine residue, wherein the GLP-1 receptor binding polypeptide has the following sequence of SEQ ID NO:191
  MOD_RES (84)..(84): and is linked to the interleukin-1 receptor antagonistic protein by reacting the mercapto group on the side chain of a terminal cysteine residue with the maleimide

SEQ ID NO: 72 - protein, 152 aa, Artificial Sequence; identical to SEQ ID NO: 52
  Description of Artificial Sequence: Synthetic fusion protein G-72
  MOD_RES (116)..(116): S-maleimide-PEG11-maleimide-S-GLP-1 receptor binding polypeptide,S is the sulphur atom on the side chain of a cysteine residue, wherein the GLP-1 receptor binding polypeptide has the sequence of SEQ ID NO: 191 and is
  MOD_RES (116)..(116): linked to the interleukin-1 receptor antagonistic protein by reacting the mercapto group on the side chain of a terminal cysteine residue with the maleimide

SEQ ID NO: 73 - protein, 152 aa, Artificial Sequence; identical to SEQ ID NO: 51
  Description of Artificial Sequence: Synthetic fusion protein G-73
  MOD_RES (84)..(84): S-maleimide-PEG11-maleimide-S-GLP-1 receptor binding polypeptide,S is the sulphur atom on the side chain of a cysteine residue, wherein the GLP-1 receptor binding polypeptide has the sequence of SEQ ID NO:189 and is
  MOD_RES (84)..(84): linked to the interleukin-1 receptor antagonistic protein by reacting the mercapto group on the side chain of a terminal cysteine residue with the maleimide

SEQ ID NO: 74 - protein, 152 aa, Artificial Sequence; identical to SEQ ID NO: 52
  Description of Artificial Sequence: Synthetic fusion protein G-74
  MOD_RES (116)..(116): S-maleimide-PEG11-maleimide-S-GLP-1 receptor binding polypeptide,S is the sulphur atom on the side chain of a cysteine residue,wherein the GLP-1 receptor binding polypeptide has the sequence of SEQ ID NO:189 and is
  MOD_RES (116)..(116): linked to the interleukin-1 receptor antagonistic protein by reacting the mercapto group on the side chain of a terminal cysteine residue with the maleimide

SEQ ID NO: 75 - protein, 152 aa, Artificial Sequence; identical to SEQ ID NO: 51
  Description of Artificial Sequence: Synthetic fusion protein G-75
  MOD_RES (84)..(84): S-maleimide-PEG11-maleimide-S-GLP-1 receptor binding polypeptide,S is the sulphur atom on the side chain of a cysteine residue, wherein the GLP-1 receptor binding polypeptide has the sequence of SEQ ID NO: 190 and is
  MOD_RES (84)..(84): linked to the interleukin-1 receptor antagonistic protein by reacting the mercapto group on the side chain of a cysteine residue with the maleimide

SEQ ID NO: 76 - protein, 152 aa, Artificial Sequence; identical to SEQ ID NO: 52
  Description of Artificial Sequence: Synthetic fusion protein G-76
  MOD_RES (116)..(116): S-maleimide-PEG11-maleimide-S-GLP-1 receptor binding polypeptide,S is the sulphur atom on the side chain of a cysteine residue, wherein the GLP-1 receptor binding polypeptide has the sequence of SEQ ID NO: 190 and is
  MOD_RES (116)..(116): linked to the interleukin-1 receptor antagonistic protein by reacting the mercapto group on the side chain of a cysteine residue with the maleimide

SEQ ID NO: 77 - protein, 152 aa, Artificial Sequence; identical to SEQ ID NO: 51
  Description of Artificial Sequence: Synthetic fusion protein G-77
  MOD_RES (84)..(84): S-maleimide-PEG11-maleimide-S-GLP-1 receptor binding polypeptide,S is the sulphur atom on the side chain of a cysteine residue,wherein the GLP-1 receptor binding polypeptide has the following sequence of SEQ ID NO:192
  MOD_RES (84)..(84): and is linked to the interleukin-1 receptor antagonistic protein by reacting the mercapto group on the side chain of a cysteine residue with the maleimide

SEQ ID NO: 78 - protein, 152 aa, Artificial Sequence; identical to SEQ ID NO: 52
  Description of Artificial Sequence: Synthetic fusion protein G-78
  MOD_RES (116)..(116): S-maleimide-PEG11-maleimide-S-GLP-1 receptor binding polypeptide,S is the sulphur atom on the side chain of a cysteine residue,, wherein the GLP-1 receptor binding polypeptide has the sequence of SEQ ID NO: 192 and is
  MOD_RES (116)..(116): linked to the interleukin-1 receptor antagonistic protein by reacting the mercapto group on the side chain of a cysteine residue with the maleimide

SEQ ID NO: 79 - protein, 152 aa, Artificial Sequence; identical to SEQ ID NO: 51
  Description of Artificial Sequence: Synthetic fusion protein G-79
  MOD_RES (84)..(84): S-maleimide-PEG11-maleimide-S-GLP-1 receptor binding polypeptide,S is the sulphur atom on the side chain of a cysteine residue, wherein the GLP-1 receptor binding polypeptide has the following sequence of SEQ ID NO:193
  MOD_RES (84)..(84): and is linked to the interleukin-1 receptor antagonistic protein by reacting the mercapto group on the side chain of a terminal cysteine residue with the maleimide;

SEQ ID NO: 80 - protein, 152 aa, Artificial Sequence; identical to SEQ ID NO: 52
  Description of Artificial Sequence: Synthetic fusion protein G-80
  MOD_RES (116)..(116): S-maleimide-PEG11-maleimide-S-GLP-1 receptor binding polypeptide, S is the sulphur atom on the side chain of a cysteine residue,wherein the GLP-1 receptor binding polypeptide has the sequence of SEQ ID NO: 193 and is
  MOD_RES (116)..(116): linked to the interleukin-1 receptor antagonistic protein by reacting the mercapto group on the side chain of a terminal cysteine residue with the maleimide

SEQ ID NO: 81 - protein, 796 aa, Artificial Sequence
  Description of Artificial Sequence: Synthetic fusion protein G-81
HGEGTFTSDLSKQMEEEAVRLFIEWLKNGGPSSGAPPPSGGGGSGGGGSDAHKSEVAHRFKDLGEENFKALVLIAFAQYLQQCPFEDHVKLVNEVTEFAKTCVADESAENCDKSLHTLFGDKLCTVATLRETYGEMADCCAKQEPERNECFLQHKDDNPNLPRLVRPEVDVMCTAFHDNEETFLKKYLYEIARRHPYFYAPELLFFAKRYKAAFTECCQAADKAACLLPKLDELRDEGKASSAKQRLKCASLQKFGERAFKAWAVARLSQRFPKAEFAEVSKLVTDLTKVHTECCHGDLLECADDRADLAKYICENQDSISSKLKECCEKPLLEKSHCIAEVENDEMPADLPSLAADFVESKDVCKNYAEAKDVFLGMFLYEYARRHPDYSVVLLLRLAKTYETTLEKCCAAADPHECYAKVFDEFKPLVEEPQNLIKQNCELFEQLGEYKFQNALLVRYTKKVPQVSTPTLVEVSRNLGKVGSKCCKHPEAKRMPCAEDYLSVVLNQLCVLHEKTPVSDRVTKCCTESLVNRRPCFSALEVDETYVPKEFNAETFTFHADICTLSEKERQIKKQTALVELVKHKPKATKEQLKAVMDDFAAFVEKCCKADDKETCFAEEGKKLVAASQAALGLGGGGSGGGGSRPSGRKSSKMQAFRIWDVNQKTFYLRNNQLVAGYLQGPNVNLEEKIDVVPIEPHALFLGIHGGKMCLSCVKSGDETRLQLEAVNITDLSENRKQDKRFAFIRSDSGPTTSFESAACPGWFLCTAMEADQPVSLTNMPDEGVMVTKFYFQEDE

SEQ ID NO: 82 - protein, 796 aa, Artificial Sequence [sequence omitted]

SEQ ID NO: 83 - protein, 796 aa, Artificial Sequence
  Description of Artificial Sequence: Synthetic fusion protein G-83
HGEGTFTSDLSKQMEEEAVRLFIEWLKNGGPSSGAPPPSGGGGSGGGGSRPSGRKSSKMQAFRIWDVNQKTFYLRNNQLVAGYLQGPNVNLEEKIDVVPIEPHALFLGIHGGKMCLSCVKSGDETRLQLEAVNITDLSENRKQDKRFAFIRSDSGPTTSFESAACPGWFLCTAMEADQPVSLTNMPDEGVMVTKFYFQEDEGGGGSGGGGSDAHKSEVAHRFKDLGEENFKALVLIAFAQYLQQCPFEDHVKLVNEVTEFAKTCVADESAENCDKSLHTLFGDKLCTVATLRETYGEMADCCAKQEPERNECFLQHKDDNPNLPRLVRPEVDVMCTAFHDNEETFLKKYLYEIARRHPYFYAPELLFFAKRYKAAFTECCQAADKAACLLPKLDELRDEGKASSAKQRLKCASLQKFGERAFKAWAVARLSQRFPKAEFAEVSKLVTDLTKVHTECCHGDLLECADDRADLAKYICENQDSISSKLKECCEKPLLEKSHCIAEVENDEMPADLPSLAADFVESKDVCKNYAEAKDVFLGMFLYEYARRHPDYSVVLLLRLAKTYETTLEKCCAAADPHECYAKVFDEFKPLVEEPQNLIKQNCELFEQLGEYKFQNALLVRYTKKVPQVSTPTLVEVSRNLGKVGSKCCKHPEAKRMPCAEDYLSVVLNQLCVLHEKTPVSDRVTKCCTESLVNRRPCFSALEVDETYVPKEFNAETFTFHADICTLSEKERQIKKQTALVELVKHKPKATKEQLKAVMDDFAAFVEKCCKADDKETCFAEEGKKLVAASQAALGL

SEQ ID NO: 84 - protein, 796 aa, Artificial Sequence
  Description of Artificial Sequence: Synthetic fusion protein G-84
HGEGTFTSDVSSYLEEQAAKEFIAWLVKGRPSSGAPPPSGGGGSGGGGSRPSGRKSSKMQAFRIWDVNQKTFYLRNNQLVAGYLQGPNVNLEEKIDVVPIEPHALFLGIHGGKMCLSCVKSGDETRLQLEAVNITDLSENRKQDKRFAFIRSDSGPTTSFESAACPGWFLCTAMEADQPVSLTNMPDEGVMVTKFYFQEDEGGGGSGGGGSDAHKSEVAHRFKDLGEENFKALVLIAFAQYLQQCPFEDHVKLVNEVTEFAKTCVADESAENCDKSLHTLFGDKLCTVATLRETYGEMADCCAKQEPERNECFLQHKDDNPNLPRLVRPEVDVMCTAFHDNEETFLKKYLYEIARRHPYFYAPELLFFAKRYKAAFTECCQAADKAACLLPKLDELRDEGKASSAKQRLKCASLQKFGERAFKAWAVARLSQRFPKAEFAEVSKLVTDLTKVHTECCHGDLLECADDRADLAKYICENQDSISSKLKECCEKPLLEKSHCIAEVENDEMPADLPSLAADFVESKDVCKNYAEAKDVFLGMFLYEYARRHPDYSVVLLLRLAKTYETTLEKCCAAADPHECYAKVFDEFKPLVEEPQNLIKQNCELFEQLGEYKFQNALLVRYTKKVPQVSTPTLVEVSRNLGKVGSKCCKHPEAKRMPCAEDYLSVVLNQLCVLHEKTPVSDRVTKCCTESLVNRRPCFSALEVDETYVPKEFNAETFTFHADICTLSEKERQIKKQTALVELVKHKPKATKEQLKAVMDDFAAFVEKCCKADDKETCFAEEGKKLVAASQAALGL

SEQ ID NO: 85 - protein, 215 aa, Artificial Sequence
  Description of Artificial Sequence: Synthetic fusion protein IN-1
FVNQHLCGSHLVEALYLVCGERGFFYTPKTGSGSSSAAAPQTGIVEQCCTSICSLYQLENYCNRPSGRKSSKMQAFRIWDVNQKTFYLRNNQLVAGYLQGPNVNLEEKIDVVPIEPHALFLGIHGGKMCLSCVKSGDETRLQLEAVNITDLSENRKQDKRFAFIRSDSGPTTSFESAACPGWFLCTAMEADQPVSLTNMPDEGVMVTKFYFQEDE

SEQ ID NO: 86 - protein, 215 aa, Artificial Sequence
  Description of Artificial Sequence: Synthetic fusion protein IN-2
FVNQHLCGSHLVEALYLVCGERGFFYTPKTGSGSSSAAAPQTGIVEQCCTSICSLYQLENYCNRPSGRKSSKMQAFRIWDVNQKTFYLRNNQLVAGYLQGPNVNLEEKIDVVPIEPHALFLGIHGGKMCLSCVKSGDETRLQLEAVNITDLSENRKQDKRFAFIRSDSGPTTSFESAASPGWFLCTAMEADQPVSLTNMPDEGVMVTKFYFQEDE

SEQ ID NO: 87 - protein, 215 aa, Artificial Sequence
  Description of Artificial Sequence: Synthetic fusion protein IN-3
FVNQHLCGSHLVEALYLVCGERGFFYTPKTGSGSSSAAAPQTGIVEQCCTSICSLYQLENYCNRPSGRKSSKMQAFRIWDVNQKTFYLRNNQLVAGYLQGPNVNLEEKIDVVPIEPHALFLGIHGGKMSLSSVKSGDETRLQLEAVNITDLSENRKQDKRFAFIRSDSGPTTSFESAASPGWFLSTAMEADQPVSLTNMPDEGVMVTKFYFQEDE

SEQ ID NO: 88 - protein, 220 aa, Artificial Sequence
  Description of Artificial Sequence: Synthetic fusion protein IN-4
FVNQHLCGSHLVEALYLVCGERGFFYTPKTGSGSSSAAAPQTGIVEQCCTSICSLYQLENYCNGGGGSRPSGRKSSKMQAFRIWDVNQKTFYLRNNQLVAGYLQGPNVNLEEKIDVVPIEPHALFLGIHGGKMCLSCVKSGDETRLQLEAVNITDLSENRKQDKRFAFIRSDSGPTTSFESAACPGWFLCTAMEADQPVSLTNMPDEGVMVTKFYFQEDE

SEQ ID NO: 89 - protein, 220 aa, Artificial Sequence
  Description of Artificial Sequence: Synthetic fusion protein IN-5
FVNQHLCGSHLVEALYLVCGERGFFYTPKTGSGSSSAAAPQTGIVEQCCTSICSLYQLENYCNGGGGSRPSGRKSSKMQAFRIWDVNQKTFYLRNNQLVAGYLQGPNVNLEEKIDVVPIEPHALFLGIHGGKMCLSCVKSGDETRLQLEAVNITDLSENRKQDKRFAFIRSDSGPTTSFESAASPGWFLCTAMEADQPVSLTNMPDEGVMVTKFYFQEDE

SEQ ID NO: 90 - protein, 220 aa, Artificial Sequence
  Description of Artificial Sequence: Synthetic fusion protein IN-6
FVNQHLCGSHLVEALYLVCGERGFFYTPKTGSGSSSAAAPQTGIVEQCCTSICSLYQLENYCNGGGGSRPSGRKSSKMQAFRIWDVNQKTFYLRNNQLVAGYLQGPNVNLEEKIDVVPIEPHALFLGIHGGKMSLSSVKSGDETRLQLEAVNITDLSENRKQDKRFAFIRSDSGPTTSFESAASPGWFLSTAMEADQPVSLTNMPDEGVMVTKFYFQEDE

SEQ ID NO: 91 - protein, 225 aa, Artificial Sequence
  Description of Artificial Sequence: Synthetic fusion protein IN-7
FVNQHLCGSHLVEALYLVCGERGFFYTPKTGSGSSSAAAPQTGIVEQCCTSICSLYQLENYCNGGGGSGGGGSRPSGRKSSKMQAFRIWDVNQKTFYLRNNQLVAGYLQGPNVNLEEKIDVVPIEPHALFLGIHGGKMCLSCVKSGDETRLQLEAVNITDLSENRKQDKRFAFIRSDSGPTTSFESAACPGWFLCTAMEADQPVSLTNMPDEGVMVTKFYFQEDE

SEQ ID NO: 92 - protein, 225 aa, Artificial Sequence
  Description of Artificial Sequence: Synthetic fusion protein IN-8
FVNQHLCGSHLVEALYLVCGERGFFYTPKTGSGSSSAAAPQTGIVEQCCTSICSLYQLENYCNGGGGSGGGGSRPSGRKSSKMQAFRIWDVNQKTFYLRNNQLVAGYLQGPNVNLEEKIDVVPIEPHALFLGIHGGKMCLSCVKSGDETRLQLEAVNITDLSENRKQDKRFAFIRSDSGPTTSFESAASPGWFLCTAMEADQPVSLTNMPDEGVMVTKFYFQEDE

SEQ ID NO: 93 - protein, 225 aa, Artificial Sequence
  Description of Artificial Sequence: Synthetic fusion protein IN-9
FVNQHLCGSHLVEALYLVCGERGFFYTPKTGSGSSSAAAPQTGIVEQCCTSICSLYQLENYCNGGGGSGGGGSRPSGRKSSKMQAFRIWDVNQKTFYLRNNQLVAGYLQGPNVNLEEKIDVVPIEPHALFLGIHGGKMSLSSVKSGDETRLQLEAVNITDLSENRKQDKRFAFIRSDSGPTTSFESAASPGWFLSTAMEADQPVSLTNMPDEGVMVTKFYFQEDE

SEQ ID NO: 94 - protein, 230 aa, Artificial Sequence
  Description of Artificial Sequence: Synthetic fusion protein IN-10
FVNQHLCGSHLVEALYLVCGERGFFYTPKTGSGSSSAAAPQTGIVEQCCTSICSLYQLENYCNGGGGSGGGGSGGGGSRPSGRKSSKMQAFRIWDVNQKTFYLRNNQLVAGYLQGPNVNLEEKIDVVPIEPHALFLGIHGGKMCLSCVKSGDETRLQLEAVNITDLSENRKQDKRFAFIRSDSGPTTSFESAACPGWFLCTAMEADQPVSLTNMPDEGVMVTKFYFQEDE

SEQ ID NO: 95 - protein, 230 aa, Artificial Sequence
  Description of Artificial Sequence: Synthetic fusion protein IN-11
FVNQHLCGSHLVEALYLVCGERGFFYTPKTGSGSSSAAAPQTGIVEQCCTSICSLYQLENYCNGGGGSGGGGSGGGGSRPSGRKSSKMQAFRIWDVNQKTFYLRNNQLVAGYLQGPNVNLEEKIDVVPIEPHALFLGIHGGKMCLSCVKSGDETRLQLEAVNITDLSENRKQDKRFAFIRSDSGPTTSFESAASPGWFLCTAMEADQPVSLTNMPDEGVMVTKFYFQEDE

SEQ ID NO: 96 - protein, 230 aa, Artificial Sequence
  Description of Artificial Sequence: Synthetic fusion protein IN-12
FVNQHLCGSHLVEALYLVCGERGFFYTPKTGSGSSSAAAPQTGIVEQCCTSICSLYQLENYCNGGGGSGGGGSGGGGSRPSGRKSSKMQAFRIWDVNQKTFYLRNNQLVAGYLQGPNVNLEEKIDVVPIEPHALFLGIHGGKMSLSSVKSGDETRLQLEAVNITDLSENRKQDKRFAFIRSDSGPTTSFESAASPGWFLSTAMEADQPVSLTNMPDEGVMVTKFYFQEDE

SEQ ID NO: 97 - protein, 210 aa, Artificial Sequence
  Description of Artificial Sequence: Synthetic fusion protein IN-13
FVNQHLCGSHLVEALYLVCGERGFFGSGSSSAAAPQTGIVEQCCTSICSLYQLENYCNRPSGRKSSKMQAFRIWDVNQKTFYLRNNQLVAGYLQGPNVNLEEKIDVVPIEPHALFLGIHGGKMCLSCVKSGDETRLQLEAVNITDLSENRKQDKRFAFIRSDSGPTTSFESAACPGWFLCTAMEADQPVSLTNMPDEGVMVTKFYFQEDE

SEQ ID NO: 98 - protein, 210 aa, Artificial Sequence
  Description of Artificial Sequence: Synthetic fusion protein IN-14
FVNQHLCGSHLVEALYLVCGERGFFGSGSSSAAAPQTGIVEQCCTSICSLYQLENYCNRPSGRKSSKMQAFRIWDVNQKTFYLRNNQLVAGYLQGPNVNLEEKIDVVPIEPHALFLGIHGGKMCLSCVKSGDETRLQLEAVNITDLSENRKQDKRFAFIRSDSGPTTSFESAASPGWFLCTAMEADQPVSLTNMPDEGVMVTKFYFQEDE

SEQ ID NO: 99 - protein, 210 aa, Artificial Sequence
  Description of Artificial Sequence: Synthetic fusion protein IN-15
FVNQHLCGSHLVEALYLVCGERGFFGSGSSSAAAPQTGIVEQCCTSICSLYQLENYCNRPSGRKSSKMQAFRIWDVNQKTFYLRNNQLVAGYLQGPNVNLEEKIDVVPIEPHALFLGIHGGKMSLSSVKSGDETRLQLEAVNITDLSENRKQDKRFAFIRSDSGPTTSFESAASPGWFLSTAMEADQPVSLTNMPDEGVMVTKFYFQEDE

SEQ ID NO: 100 - protein, 215 aa, Artificial Sequence
  Description of Artificial Sequence: Synthetic fusion protein IN-16
FVNQHLCGSHLVEALYLVCGERGFFGSGSSSAAAPQTGIVEQCCTSICSLYQLENYCNGGGGSRPSGRKSSKMQAFRIWDVNQKTFYLRNNQLVAGYLQGPNVNLEEKIDVVPIEPHALFLGIHGGKMCLSCVKSGDETRLQLEAVNITDLSENRKQDKRFAFIRSDSGPTTSFESAACPGWFLCTAMEADQPVSLTNMPDEGVMVTKFYFQEDE

SEQ ID NO: 101 - protein, 215 aa, Artificial Sequence
  Description of Artificial Sequence: Synthetic fusion protein IN-17
FVNQHLCGSHLVEALYLVCGERGFFGSGSSSAAAPQTGIVEQCCTSICSLYQLENYCNGGGGSRPSGRKSSKMQAFRIWDVNQKTFYLRNNQLVAGYLQGPNVNLEEKIDVVPIEPHALFLGIHGGKMCLSCVKSGDETRLQLEAVNITDLSENRKQDKRFAFIRSDSGPTTSFESAASPGWFLCTAMEADQPVSLTNMPDEGVMVTKFYFQEDE

SEQ ID NO: 102 - protein, 215 aa, Artificial Sequence
  Description of Artificial Sequence: Synthetic fusion protein IN-18
FVNQHLCGSHLVEALYLVCGERGFFGSGSSSAAAPQTGIVEQCCTSICSLYQLENYCNGGGGSRPSGRKSSKMQAFRIWDVNQKTFYLRNNQLVAGYLQGPNVNLEEKIDVVPIEPHALFLGIHGGKMSLSSVKSGDETRLQLEAVNITDLSENRKQDKRFAFIRSDSGPTTSFESAASPGWFLSTAMEADQPVSLTNMPDEGVMVTKFYFQEDE

SEQ ID NO: 103 - protein, 220 aa, Artificial Sequence
  Description of Artificial Sequence: Synthetic fusion protein IN-19
FVNQHLCGSHLVEALYLVCGERGFFGSGSSSAAAPQTGIVEQCCTSICSLYQLENYCNGGGGSGGGGSRPSGRKSSKMQAFRIWDVNQKTFYLRNNQLVAGYLQGPNVNLEEKIDVVPIEPHALFLGIHGGKMCLSCVKSGDETRLQLEAVNITDLSENRKQDKRFAFIRSDSGPTTSFESAACPGWFLCTAMEADQPVSLTNMPDEGVMVTKFYFQEDE

SEQ ID NO: 104 - protein, 220 aa, Artificial Sequence
  Description of Artificial Sequence: Synthetic fusion protein IN-20
FVNQHLCGSHLVEALYLVCGERGFFGSGSSSAAAPQTGIVEQCCTSICSLYQLENYCNGGGGSGGGGSRPSGRKSSKMQAFRIWDVNQKTFYLRNNQLVAGYLQGPNVNLEEKIDVVPIEPHALFLGIHGGKMCLSCVKSGDETRLQLEAVNITDLSENRKQDKRFAFIRSDSGPTTSFESAASPGWFLCTAMEADQPVSLTNMPDEGVMVTKFYFQEDE

SEQ ID NO: 105 - protein, 220 aa, Artificial Sequence
  Description of Artificial Sequence: Synthetic fusion protein IN-21
FVNQHLCGSHLVEALYLVCGERGFFGSGSSSAAAPQTGIVEQCCTSICSLYQLENYCNGGGGSGGGGSRPSGRKSSKMQAFRIWDVNQKTFYLRNNQLVAGYLQGPNVNLEEKIDVVPIEPHALFLGIHGGKMSLSSVKSGDETRLQLEAVNITDLSENRKQDKRFAFIRSDSGPTTSFESAASPGWFLSTAMEADQPVSLTNMPDEGVMVTKFYFQEDE

SEQ ID NO: 106 - protein, 225 aa, Artificial Sequence
  Description of Artificial Sequence: Synthetic fusion protein IN-22
FVNQHLCGSHLVEALYLVCGERGFFGSGSSSAAAPQTGIVEQCCTSICSLYQLENYCNGGGGSGGGGSGGGGSRPSGRKSSKMQAFRIWDVNQKTFYLRNNQLVAGYLQGPNVNLEEKIDVVPIEPHALFLGIHGGKMCLSCVKSGDETRLQLEAVNITDLSENRKQDKRFAFIRSDSGPTTSFESAACPGWFLCTAMEADQPVSLTNMPDEGVMVTKFYFQEDE

SEQ ID NO: 107 - protein, 225 aa, Artificial Sequence
  Description of Artificial Sequence: Synthetic fusion protein IN-23
FVNQHLCGSHLVEALYLVCGERGFFGSGSSSAAAPQTGIVEQCCTSICSLYQLENYCNGGGGSGGGGSGGGGSRPSGRKSSKMQAFRIWDVNQKTFYLRNNQLVAGYLQGPNVNLEEKIDVVPIEPHALFLGIHGGKMCLSCVKSGDETRLQLEAVNITDLSENRKQDKRFAFIRSDSGPTTSFESAASPGWFLCTAMEADQPVSLTNMPDEGVMVTKFYFQEDE

SEQ ID NO: 108 - protein, 225 aa, Artificial Sequence
  Description of Artificial Sequence: Synthetic fusion protein IN-24
FVNQHLCGSHLVEALYLVCGERGFFGSGSSSAAAPQTGIVEQCCTSICSLYQLENYCNGGGGSGGGGSGGGGSRPSGRKSSKMQAFRIWDVNQKTFYLRNNQLVAGYLQGPNVNLEEKIDVVPIEPHALFLGIHGGKMSLSSVKSGDETRLQLEAVNITDLSENRKQDKRFAFIRSDSGPTTSFESAASPGWFLSTAMEADQPVSLTNMPDEGVMVTKFYFQEDE

SEQ ID NO: 109 - protein, 225 aa, Artificial Sequence; identical to SEQ ID NO: 91
  Description of Artificial Sequence: Synthetic fusion protein IN-25
  MOD_RES (189)..(189): S-maleimide-(CH2)4-NH-(Nalpha-(HOOC(CH2)14CO)-gamma-Glu),S is the sulphur atom on the side chain of a cysteine residue

SEQ ID NO: 110 - protein, 225 aa, Artificial Sequence
  Description of Artificial Sequence: Synthetic fusion protein IN-26
  MOD_RES (157)..(157): S-CH2-CONH-(CH2CH2O)2-(CH2)2-NH-(Nalpha- (HOOC(CH2)14CO)-gamma-Glu),S is the sulphur atom on the side chain of a cysteine residue
FVNQHLCGSHLVEALYLVCGERGFFYTPKTGSGSSSAAAPQTGIVEQCCTSICSLYQLENYCNGGGGSGGGGSRPSGRKSSKMQAFRIWDVNQKTFYLRNNQLVAGYLQGPNVNLEEKIDVVPIEPHALFLGIHGGKMCLSCVKSGDETRLQLEAVCITDLSENRKQDKRFAFIRSDSGPTTSFESAASPGWFLCTAMEADQPVSLTNMPDEGVMVTKFYFQEDE

SEQ ID NO: 111 - protein, 220 aa, Artificial Sequence; identical to SEQ ID NO: 103
  Description of Artificial Sequence: Synthetic fusion protein IN-27
  MOD_RES (184)..(184): S-CH2-CONH-PEG20K,S is the sulphur atom on the side chain of a cysteine residue

SEQ ID NO: 112 - protein, 220 aa, Artificial Sequence
  Description of Artificial Sequence: Synthetic fusion protein IN-28
  MOD_RES (152)..(152): S-maleimide-(CH2)15-COOH,S is the sulphur atom on the side chain of a cysteine residue
FVNQHLCGSHLVEALYLVCGERGFFGSGSSSAAAPQTGIVEQCCTSICSLYQLENYCNGGGGSGGGGSRPSGRKSSKMQAFRIWDVNQKTFYLRNNQLVAGYLQGPNVNLEEKIDVVPIEPHALFLGIHGGKMCLSCVKSGDETRLQLEAVCITDLSENRKQDKRFAFIRSDSGPTTSFESAASPGWFLCTAMEADQPVSLTNMPDEGVMVTKFYFQEDE

SEQ ID NO: 113 - protein, 63 aa, Artificial Sequence
  Description of Artificial Sequence: Synthetic fusion protein IN-29
  MOD_RES (32)..(32): NEpsilon-PEG12-maleimide-IL-1ra,wherein the sequence of the IL-1ra has a sequence of SEQ ID NO:194, the N-hydroxylsuccinimide of the linking group, i.e. maleimide-PEG12-NHS, is reacted with the amino group on
  MOD_RES (32)..(32): the side chain of a lysine in the insulin receptor binding polypeptide, and the maleimide is reacted with the mercapto group on the side chain of a cysteine at position 116 underlined in the IL-1ra
FVNQHLCGSHLVEALYLVCGERGFFYTPRTGKGSSSAAAPQTGIVEQCCTSICSLYQLENYCN

SEQ ID NO: 114 - protein, 63 aa, Artificial Sequence; identical to SEQ ID NO: 113
  Description of Artificial Sequence: Synthetic fusion protein IN-30
  MOD_RES (32)..(32): NEpsilon-PEG12-maleimide-the interleukin-1 receptor antagonistic protein,in which the sequence of the interleukin-1 receptor antagonistic protein is SEQ ID NO:195,the N-hydroxylsuccinimide of the linking
  MOD_RES (32)..(32): group, i.e. maleimide-PEG12-NHS, is reacted with the amino group on the side chain of a lysine in the insulin receptor binding polypeptide, and the maleimide is reacted with the mercapto group on the side chain of a
  MOD_RES (32)..(32): cysteine at position 84 underlined in the interleukin-1 receptor antagonistic protein.

SEQ ID NO: 115 - protein, 63 aa, Artificial Sequence; identical to SEQ ID NO: 113
  Description of Artificial Sequence: Synthetic fusion protein IN-31
  MOD_RES (32)..(32): NEpsilon-PEG20K-maleimide-IL-1ra,in which the sequence of IL-1ra is SEQ ID NO:194 and the N-hydroxylsuccinimide of the linking group, i.e. maleimide-PEG20K-NHS, is reacted with the amino group on the side chain of a
  MOD_RES (32)..(32): lysine in the insulin receptor binding polypeptide, and the maleimide is reacted with the mercapto group on the side chain of a cysteine at position 116 underlined in the IL-1ra

SEQ ID NO: 116 - protein, 63 aa, Artificial Sequence; identical to SEQ ID NO: 113
  Description of Artificial Sequence: Synthetic fusion protein IN-32
  MOD_RES (32)..(32): NEpsilon-PEG20K-maleimide-the interleukin-1 receptor antagonistic protein,in which the sequence of the interleukin-1 receptor antagonistic protein is SEQ ID NO:195, and the N-hydroxylsuccinimide of the
  MOD_RES (32)..(32): linking group, i.e. maleimide-PEG20K-NHS, is reacted with the amino group on the side chain of a lysine in the insulin receptor binding polypeptide, and the maleimide is reacted with the mercapto group on the side
  MOD_RES (32)..(32): chain of a cysteine at position 84 underlined in the interleukin-1 receptor antagonistic protein

SEQ ID NO: 117 - protein, 63 aa, Artificial Sequence; identical to SEQ ID NO: 113
  Description of Artificial Sequence: Synthetic fusion protein IN-33
  MOD_RES (1)..(1): Nalpha-(Nalpha-(HOOC(CH2)14CO)-gamma-L-Glu)
  MOD_RES (32)..(32): NEpsilon-PEG12-maleimide-IL-1ra,in which the sequence of IL-1ra is SEQ ID NO:194 and the N-hydroxylsuccinimide of the linking group, i.e. maleimide-PEG12-NHS, is reacted with the amino group on the side chain of a
  MOD_RES (32)..(32): lysine in the insulin receptor binding polypeptide, and the maleimide is reacted with the mercapto group on the side chain of a cysteine at position 116 underlined in the IL-1ra

SEQ ID NO: 118 - protein, 63 aa, Artificial Sequence; identical to SEQ ID NO: 113
  Description of Artificial Sequence: Synthetic fusion protein IN-34
  MOD_RES (1)..(1): Nalpha-(Nalpha-(HOOC(CH2)16CO)-gamma-L-Glu)
  MOD_RES (32)..(32): NEpsilon-PEG12-maleimide-the interleukin-1 receptor antagonistic protein,in which the sequence of the interleukin-1 receptor antagonistic protein is SEQ ID NO:195, and the N-hydroxylsuccinimide of the
  MOD_RES (32)..(32): linking group, i.e. maleimide-PEG12-NHS, is reacted with the amino group on the side chain of a lysine in the insulin receptor binding polypeptide, and the maleimide is reacted with the mercapto group on the side chain of
  MOD_RES (32)..(32): a cysteine at position 84 underlined in the interleukin-1 receptor antagonistic protein

SEQ ID NO: 119 - protein, 152 aa, Artificial Sequence; identical to SEQ ID NO: 52
  Description of Artificial Sequence: Synthetic fusion protein IN-35
  MOD_RES (116)..(116): S-maleimide-PEG12-human insulin,S is the sulphur atom on the side chain of a cysteine residue

SEQ ID NO: 120 - protein, 152 aa, Artificial Sequence; identical to SEQ ID NO: 52
  Description of Artificial Sequence: Synthetic fusion protein IN-36
  MOD_RES (116)..(116): S-maleimide-PEG12-the insulin receptor binding polypeptide,S is the sulphur atom on the side chain of a cysteine residue

SEQ ID NO: 121 - protein, 152 aa, Artificial Sequence; identical to SEQ ID NO: 52
  Description of Artificial Sequence: Synthetic fusion protein IN-37
  MOD_RES (116)..(116): S-maleimide-PEG20K-human insulin,S is the sulphur atom on the side chain of a cysteine residue

SEQ ID NO: 122 - protein, 152 aa, Artificial Sequence; identical to SEQ ID NO: 51
  Description of Artificial Sequence: Synthetic fusion protein IN-38
  MOD_RES (84)..(84): S-maleimide-PEG 12-human insulin,S is the sulphur atom on the side chain of a cysteine residue

SEQ ID NO: 123 - protein, 152 aa, Artificial Sequence; identical to SEQ ID NO: 51
  Description of Artificial Sequence: Synthetic fusion protein IN-39
  MOD_RES (84)..(84): S-maleimide-PEG 20K-human insulin,S is the sulphur atom on the side chain of a cysteine residue

SEQ ID NO: 124 - protein, 152 aa, Artificial Sequence; identical to SEQ ID NO: 51
  Description of Artificial Sequence: Synthetic fusion protein IN-40
  MOD_RES (84)..(84): S-maleimide-PEG12-the insulin receptor binding polypeptide,S is the sulphur atom on the side chain of a cysteine residue

SEQ ID NO: 125 - protein, 152 aa, Artificial Sequence; identical to SEQ ID NO: 52
  Description of Artificial Sequence: Synthetic fusion protein IN-41
  MOD_RES (116)..(116): S-maleimide-PEG12-human insulin desB30T,S is the sulphur atom on the side chain of a cysteine residue

SEQ ID NO: 126 - protein, 152 aa, Artificial Sequence; identical to SEQ ID NO: 52
  Description of Artificial Sequence: Synthetic fusion protein IN-42
  MOD_RES (116)..(116): S-maleimide-PEG20K-human insulin desB30T,S is the sulphur atom on the side chain of a cysteine residue

SEQ ID NO: 127 - protein, 152 aa, Artificial Sequence; identical to SEQ ID NO: 51
  Description of Artificial Sequence: Synthetic fusion protein IN-43
  MOD_RES (84)..(84): S-maleimide-PEG 12-human insulin desB30T,S is the sulphur atom on the side chain of a cysteine residue

SEQ ID NO: 128 - protein, 152 aa, Artificial Sequence; identical to SEQ ID NO: 51
  Description of Artificial Sequence: Synthetic fusion protein IN-44
  MOD_RES (84)..(84): S-maleimide-PEG 20K -human insulin desB30T,S is the sulphur atom on the side chain of a cysteine residue

SEQ ID NO: 129 - protein, 64 aa, Artificial Sequence
  Description of Artificial Sequence: Synthetic fusion protein IN-45
  MOD_RES (64)..(64): NEpsilon-PEG12-maleimide-IL-1ra, wherein the sequence of the IL-1ra is SEQ ID NO:194
FVNQHLCGSHLVEALYLVCGERGFFYTPRTGSGSSSAAAPQTGIVEQCCTSICSLYQLENYCNK

SEQ ID NO: 130 - protein, 64 aa, Artificial Sequence; identical to SEQ ID NO: 129
  Description of Artificial Sequence: Synthetic fusion protein IN-46
  MOD_RES (64)..(64): NEpsilon-PEG20K-maleimide-IL-1ra,wherein the sequence of the IL-1ra is SEQ ID NO:194

SEQ ID NO: 131 - protein, 64 aa, Artificial Sequence; identical to SEQ ID NO: 129
  Description of Artificial Sequence: Synthetic fusion protein IN-47
  MOD_RES (64)..(64): NEpsilon-PEG12-maleimide-the interleukin-1 receptor antagonistic protein,the sequence of the interleukin-1 receptor antagonistic protein is SEQ ID NO:195

SEQ ID NO: 132 - protein, 64 aa, Artificial Sequence; identical to SEQ ID NO: 129
  Description of Artificial Sequence: Synthetic fusion protein IN-48
  MOD_RES (64)..(64): NEpsilon-PEG20K-maleimide-the interleukin-1 receptor antagonistic protein,the sequence of the interleukin-1 receptor antagonistic protein is SEQ ID NO:195

SEQ ID NO: 133 - protein, 63 aa, Artificial Sequence
  Description of Artificial Sequence: Synthetic fusion protein IN-49
  MOD_RES (1)..(1): Nalpha-PEG12-maleimide-IL-1ra,wherein the sequence of the IL-1ra is SEQ ID NO: 196
FVNQHLCGSHLVEALYLVCGERGFFYTPRTGSGSSSAAAPQTGIVEQCCTSICSLYQLENYCN

SEQ ID NO: 134 - protein, 63 aa, Artificial Sequence; identical to SEQ ID NO: 133
  Description of Artificial Sequence: Synthetic fusion protein IN-50
  MOD_RES (1)..(1): Nalpha-PEG20K-maleimide-IL-1ra,,wherein the sequence of the IL-1ra is SEQ ID NO:196

SEQ ID NO: 135 - protein, 63 aa, Artificial Sequence; identical to SEQ ID NO: 113
  Description of Artificial Sequence: Synthetic fusion protein IN-51
  MOD_RES (32)..(32): NEpsilon-PEG12-maleimide-the interleukin-1 receptor antagonistic protein,in which the sequence of the interleukin-1 receptor antagonistic protein is SEQ ID NO: 196

SEQ ID NO: 136 - protein, 63 aa, Artificial Sequence; identical to SEQ ID NO: 113
  Description of Artificial Sequence: Synthetic fusion protein IN-52
  MOD_RES (32)..(32): NEpsilon-PEG20K-maleimide-the interleukin-1 receptor antagonistic protein,in which the sequence of the interleukin-1 receptor antagonistic protein is SEQ ID NO: 196

SEQ ID NO: 137 - protein, 63 aa, Artificial Sequence
  Description of Artificial Sequence: Synthetic fusion protein IN-53
  MOD_RES (38)..(38): NEpsilon-PEG12-maleimide-the interleukin-1 receptor antagonistic protein,in which the sequence of the interleukin-1 receptor antagonistic protein is SEQ ID NO: 196
FVNQHLCGSHLVEALYLVCGERGFFYTPRTGSGSSSAKAPQTGIVEQCCTSICSLYQLENYCN

SEQ ID NO: 138 - protein, 63 aa, Artificial Sequence; identical to SEQ ID NO: 137
  Description of Artificial Sequence: Synthetic fusion protein IN-54
  MOD_RES (38)..(38): NEpsilon-PEG20K-maleimide-the interleukin-1 receptor antagonistic protein, in which the sequence of the interleukin-1 receptor antagonistic protein is SEQ ID NO: 196

SEQ ID NO: 139 - protein, 58 aa, Artificial Sequence
  Description of Artificial Sequence: Synthetic fusion protein IN-55
  MOD_RES (33)..(33): NEpsilon-PEG12-maleimide-IL-1ra, in which the sequence of the IL-1ra is SEQ ID NO:194
FVNQHLCGSHLVEALYLVCGERGFFGSGSSSAKAPQTGIVEQCCTSICSLYQLENYCN

SEQ ID NO: 140 - protein, 58 aa, Artificial Sequence; identical to SEQ ID NO: 139
  Description of Artificial Sequence: Synthetic fusion protein IN-56
  MOD_RES (33)..(33): NEpsilon-PEG12-maleimide-the interleukin-1 receptor antagonistic protein, in which the sequence of the interleukin-1 receptor antagonistic protein is SEQ ID NO:195

SEQ ID NO: 141 - protein, 153 aa, Artificial Sequence; identical to SEQ ID NO: 67
  Description of Artificial Sequence: Synthetic fusion protein IN-57
  MOD_RES (1)..(1): S-maleimide-PEG12-human insulin,S is the sulphur atom on the side chain of a cysteine residue

SEQ ID NO: 142 - protein, 153 aa, Artificial Sequence; identical to SEQ ID NO: 67
  Description of Artificial Sequence: Synthetic fusion protein IN-58
  MOD_RES (1)..(1): S-maleimide-PEG12-the insulin receptor binding polypeptide,S is the sulphur atom on the side chain of a cysteine residue

SEQ ID NO: 143 - protein, 153 aa, Artificial Sequence; identical to SEQ ID NO: 67
  Description of Artificial Sequence: Synthetic fusion protein IN-59
  MOD_RES (1)..(1): S-maleimide-PEG12-human insulin desB30T,S is the sulphur atom on the side chain of a cysteine residue

SEQ ID NO: 144 - protein, 154 aa, Artificial Sequence
  Description of Artificial Sequence: Synthetic fusion protein IN-60
  MOD_RES (154)..(154): S-maleimide-PEG12-human insulin,S is the sulphur atom on the side chain of a cysteine residue
MRPSGRKSSKMQAFRIWDVNQKTFYLRNNQLVAGYLQGPNVNLEEKIDVVPIEPHALFLGIHGGKMCLSCVKSGDETRLQLEAVNITDLSENRKQDKRFAFIRSDSGPTTSFESAASPGWFLCTAMEADQPVSLTNMPDEGVMVTKFYFQEDEC

SEQ ID NO: 145 - protein, 154 aa, Artificial Sequence; identical to SEQ ID NO: 144
  Description of Artificial Sequence: Synthetic fusion protein IN-61
  MOD_RES (154)..(154): S-maleimide-PEG12-human insulin desB30T,S is the sulphur atom on the side chain of a cysteine residue

SEQ ID NO: 146 - protein, 225 aa, Artificial Sequence
  Description of Artificial Sequence: Synthetic fusion protein IN-62
RPSGRKSSKMQAFRIWDVNQKTFYLRNNQLVAGYLQGPNVNLEEKIDVVPIEPHALFLGIHGGKMCLSCVKSGDETRLQLEAVNITDLSENRKQDKRFAFIRSDSGPTTSFESAACPGWFLCTAMEADQPVSLTNMPDEGVMVTKFYFQEDEGGGGSGGGGSFVNQHLCGSHLVEALYLVCGERGFFYTPKTGSGSSSAAAPQTGIVEQCCTSICSLYQLENYCN

SEQ ID NO: 147 - protein, 225 aa, Artificial Sequence
  Description of Artificial Sequence: Synthetic fusion protein IN-63
RPSGRKSSKMQAFRIWDVNQKTFYLRNNQLVAGYLQGPNVNLEEKIDVVPIEPHALFLGIHGGKMCLSCVKSGDETRLQLEAVNITDLSENRKQDKRFAFIRSDSGPTTSFESAASPGWFLCTAMEADQPVSLTNMPDEGVMVTKFYFQEDEGGGGSGGGGSFVNQHLCGSHLVEALYLVCGERGFFYTPKTGSGSSSAAAPQTGIVEQCCTSICSLYQLENYCN

SEQ ID NO: 148 - protein, 225 aa, Artificial Sequence
  Description of Artificial Sequence: Synthetic fusion protein IN-64
RPSGRKSSKMQAFRIWDVNQKTFYLRNNQLVAGYLQGPNVNLEEKIDVVPIEPHALFLGIHGGKMSLSSVKSGDETRLQLEAVNITDLSENRKQDKRFAFIRSDSGPTTSFESAASPGWFLSTAMEADQPVSLTNMPDEGVMVTKFYFQEDEGGGGSGGGGSFVNQHLCGSHLVEALYLVCGERGFFYTPKTGSGSSSAAAPQTGIVEQCCTSICSLYQLENYCN

SEQ ID NO: 149 - protein, 225 aa, Artificial Sequence
  Description of Artificial Sequence: Synthetic fusion protein IN-65
RPSGRKSSKMQAFRIWDVNQKTFYLRNNQLVAGYLQGPNVNLEEKIDVVPIEPHALFLGIHGGKMCLSCVKSGDETRLQLEAVCITDLSENRKQDKRFAFIRSDSGPTTSFESAASPGWFLCTAMEADQPVSLTNMPDEGVMVTKFYFQEDEGGGGSGGGGSFVNQHLCGSHLVEALYLVCGERGFFYTPKTGSGSSSAAAPQTGIVEQCCTSICSLYQLENYCN

SEQ ID NO: 150 - protein, 232 aa, Artificial Sequence
  Description of Artificial Sequence: Synthetic fusion protein IN-66
MRPSGRKSSKMQAFRIWDVNQKTFYLRNNQLVAGYLQGPNVNLEEKIDVVPIEPHALFLGIHGGKMCLSCVKSGDETRLQLEAVNITDLSENRKQDKRFAFIRSDSGPTTSFESAASPGWFLCTAMEADQPVSLTNMPDEGVMVTKFYFQEDEGGGGSCGGGGSGGGGSFVNQHLCGSHLVEALYLVCGERGFFYTPKTGSGSSSAAAPQTGIVEQCCTSICSLYQLENYCN

SEQ ID NO: 151 - protein, 231 aa, Artificial Sequence
  Description of Artificial Sequence: Synthetic fusion protein IN-67
FVNQHLCGSHLVEALYLVCGERGFFYTPKTGSGSSSAAAPQTGIVEQCCTSICSLYQLENYCNGGGGSGGGGSCGGGGSRPSGRKSSKMQAFRIWDVNQKTFYLRNNQLVAGYLQGPNVNLEEKIDVVPIEPHALFLGIHGGKMCLSCVKSGDETRLQLEAVNITDLSENRKQDKRFAFIRSDSGPTTSFESAASPGWFLCTAMEADQPVSLTNMPDEGVMVTKFYFQEDE

SEQ ID NO: 152 - protein, 820 aa, Artificial Sequence
  Description of Artificial Sequence: Synthetic fusion protein IN-68
DAHKSEVAHRFKDLGEENFKALVLIAFAQYLQQCPFEDHVKLVNEVTEFAKTCVADESAENCDKSLHTLFGDKLCTVATLRETYGEMADCCAKQEPERNECFLQHKDDNPNLPRLVRPEVDVMCTAFHDNEETFLKKYLYEIARRHPYFYAPELLFFAKRYKAAFTECCQAADKAACLLPKLDELRDEGKASSAKQRLKCASLQKFGERAFKAWAVARLSQRFPKAEFAEVSKLVTDLTKVHTECCHGDLLECADDRADLAKYICENQDSISSKLKECCEKPLLEKSHCIAEVENDEMPADLPSLAADFVESKDVCKNYAEAKDVFLGMFLYEYARRHPDYSVVLLLRLAKTYETTLEKCCAAADPHECYAKVFDEFKPLVEEPQNLIKQNCELFEQLGEYKFQNALLVRYTKKVPQVSTPTLVEVSRNLGKVGSKCCKHPEAKRMPCAEDYLSVVLNQLCVLHEKTPVSDRVTKCCTESLVNRRPCFSALEVDETYVPKEFNAETFTFHADICTLSEKERQIKKQTALVELVKHKPKATKEQLKAVMDDFAAFVEKCCKADDKETCFAEEGKKLVAASQAALGLGGGGSGGGGSFVNQHLCGSHLVEALYLVCGERGFFYTPKTGSGSSSAAAPQTGIVEQCCTSICSLYQLENYCNGGGGSGGGGSRPSGRKSSKMQAFRIWDVNQKTFYLRNNQLVAGYLQGPNVNLEEKIDVVPIEPHALFLGIHGGKMCLSCVKSGDETRLQLEAVNITDLSENRKQDKRFAFIRSDSGPTTSFESAACPGWFLCTAMEADQPVSLTNMPDEGVMVTKFYFQEDE

SEQ ID NO: 153 - protein, 820 aa, Artificial Sequence
  Description of Artificial Sequence: Synthetic fusion protein IN-69
DAHKSEVAHRFKDLGEENFKALVLIAFAQYLQQCPFEDHVKLVNEVTEFAKTCVADESAENCDKSLHTLFGDKLCTVATLRETYGEMADCCAKQEPERNECFLQHKDDNPNLPRLVRPEVDVMCTAFHDNEETFLKKYLYEIARRHPYFYAPELLFFAKRYKAAFTECCQAADKAACLLPKLDELRDEGKASSAKQRLKCASLQKFGERAFKAWAVARLSQRFPKAEFAEVSKLVTDLTKVHTECCHGDLLECADDRADLAKYICENQDSISSKLKECCEKPLLEKSHCIAEVENDEMPADLPSLAADFVESKDVCKNYAEAKDVFLGMFLYEYARRHPDYSVVLLLRLAKTYETTLEKCCAAADPHECYAKVFDEFKPLVEEPQNLIKQNCELFEQLGEYKFQNALLVRYTKKVPQVSTPTLVEVSRNLGKVGSKCCKHPEAKRMPCAEDYLSVVLNQLCVLHEKTPVSDRVTKCCTESLVNRRPCFSALEVDETYVPKEFNAETFTFHADICTLSEKERQIKKQTALVELVKHKPKATKEQLKAVMDDFAAFVEKCCKADDKETCFAEEGKKLVAASQAALGLGGGGSGGGGSRPSGRKSSKMQAFRIWDVNQKTFYLRNNQLVAGYLQGPNVNLEEKIDVVPIEPHALFLGIHGGKMCLSCVKSGDETRLQLEAVNITDLSENRKQDKRFAFIRSDSGPTTSFESAACPGWFLCTAMEADQPVSLTNMPDEGVMVTKFYFQEDEGGGGSGGGGSFVNQHLCGSHLVEALYLVCGERGFFYTPKTGSGSSSAAAPQTGIVEQCCTSICSLYQLENYCN

SEQ ID NO: 154 - protein, 821 aa, Artificial Sequence
  Description of Artificial Sequence: Synthetic fusion protein IN-70
MRPSGRKSSKMQAFRIWDVNQKTFYLRNNQLVAGYLQGPNVNLEEKIDVVPIEPHALFLGIHGGKMCLSCVKSGDETRLQLEAVNITDLSENRKQDKRFAFIRSDSGPTTSFESAACPGWFLCTAMEADQPVSLTNMPDEGVMVTKFYFQEDEGGGGSGGGGSDAHKSEVAHRFKDLGEENFKALVLIAFAQYLQQCPFEDHVKLVNEVTEFAKTCVADESAENCDKSLHTLFGDKLCTVATLRETYGEMADCCAKQEPERNECFLQHKDDNPNLPRLVRPEVDVMCTAFHDNEETFLKKYLYEIARRHPYFYAPELLFFAKRYKAAFTECCQAADKAACLLPKLDELRDEGKASSAKQRLKCASLQKFGERAFKAWAVARLSQRFPKAEFAEVSKLVTDLTKVHTECCHGDLLECADDRADLAKYICENQDSISSKLKECCEKPLLEKSHCIAEVENDEMPADLPSLAADFVESKDVCKNYAEAKDVFLGMFLYEYARRHPDYSVVLLLRLAKTYETTLEKCCAAADPHECYAKVFDEFKPLVEEPQNLIKQNCELFEQLGEYKFQNALLVRYTKKVPQVSTPTLVEVSRNLGKVGSKCCKHPEAKRMPCAEDYLSVVLNQLCVLHEKTPVSDRVTKCCTESLVNRRPCFSALEVDETYVPKEFNAETFTFHADICTLSEKERQIKKQTALVELVKHKPKATKEQLKAVMDDFAAFVEKCCKADDKETCFAEEGKKLVAASQAALGLGGGGSGGGGSFVNQHLCGSHLVEALYLVCGERGFFYTPKTGAGSSSAAAPQTGIVEQCCTSICSLYQLENYCN

SEQ ID NO: 155 - protein, 199 aa, Artificial Sequence
  Description of Artificial Sequence: Synthetic fusion protein GI-1
YSEGTFISDYSIAMDKIHQQDFVNWLLAQKGKKNDWKHNITQGGGGSRPSGRKSSKMQAFRIWDVNQKTFYLRNNQLVAGYLQGPNVNLEEKIDVVPIEPHALFLGIHGGKMCLSCVKSGDETRLQLEAVNITDLSENRKQDKRFAFIRSDSGPTTSFESAACPGWFLCTAMEADQPVSLTNMPDEGVMVTKFYFQEDE

SEQ ID NO: 156 - protein, 194 aa, Artificial Sequence
  Description of Artificial Sequence: Synthetic fusion protein GI-2
YAEGTFISDYSIAMDKIHQQDFVNWLLAQKGKKNDWKHNITQRPSGRKSSKMQAFRIWDVNQKTFYLRNNQLVAGYLQGPNVNLEEKIDVVPIEPHALFLGIHGGKMCLSCVKSGDETRLQLEAVNITDLSENRKQDKRFAFIRSDSGPTTSFESAACPGWFLCTAMEADQPVSLTNMPDEGVMVTKFYFQEDE

SEQ ID NO: 157 - protein, 199 aa, Artificial Sequence
  Description of Artificial Sequence: Synthetic fusion protein GI-3
YAEGTFISDYSIAMDKIHQQDFVNWLLAQKGKKNDWKHNITQGGGGSRPSGRKSSKMQAFRIWDVNQKTFYLRNNQLVAGYLQGPNVNLEEKIDVVPIEPHALFLGIHGGKMCLSCVKSGDETRLQLEAVNITDLSENRKQDKRFAFIRSDSGPTTSFESAACPGWFLCTAMEADQPVSLTNMPDEGVMVTKFYFQEDE

SEQ ID NO: 158 - protein, 204 aa, Artificial Sequence
  Description of Artificial Sequence: Synthetic fusion protein GI-4
YAEGTFISDYSIAMDKIHQQDFVNWLLAQKGKKNDWKHNITQGGGGSGGGGSRPSGRKSSKMQAFRIWDVNQKTFYLRNNQLVAGYLQGPNVNLEEKIDVVPIEPHALFLGIHGGKMCLSCVKSGDETRLQLEAVNITDLSENRKQDKRFAFIRSDSGPTTSFESAACPGWFLCTAMEADQPVSLTNMPDEGVMVTKFYFQEDE

SEQ ID NO: 159 - protein, 209 aa, Artificial Sequence
  Description of Artificial Sequence: Synthetic fusion protein GI-5
YAEGTFISDYSIAMDKIHQQDFVNWLLAQKGKKNDWKHNITQGGGGSGGGGSGGGGSRPSGRKSSKMQAFRIWDVNQKTFYLRNNQLVAGYLQGPNVNLEEKIDVVPIEPHALFLGIHGGKMCLSCVKSGDETRLQLEAVNITDLSENRKQDKRFAFIRSDSGPTTSFESAACPGWFLCTAMEADQPVSLTNMPDEGVMVTKFYFQEDE

SEQ ID NO: 160 - protein, 194 aa, Artificial Sequence
  Description of Artificial Sequence: Synthetic fusion protein GI-6
YAPGTFISDYSIAMDKIHQQDFVNWLLAQKGKKNDWKHNITQRPSGRKSSKMQAFRIWDVNQKTFYLRNNQLVAGYLQGPNVNLEEKIDVVPIEPHALFLGIHGGKMCLSCVKSGDETRLQLEAVNITDLSENRKQDKRFAFIRSDSGPTTSFESAACPGWFLCTAMEADQPVSLTNMPDEGVMVTKFYFQEDE

SEQ ID NO: 161 - protein, 199 aa, Artificial Sequence
  Description of Artificial Sequence: Synthetic fusion protein GI-7
YAPGTFISDYSIAMDKIHQQDFVNWLLAQKGKKNDWKHNITQGGGGSRPSGRKSSKMQAFRIWDVNQKTFYLRNNQLVAGYLQGPNVNLEEKIDVVPIEPHALFLGIHGGKMCLSCVKSGDETRLQLEAVNITDLSENRKQDKRFAFIRSDSGPTTSFESAACPGWFLCTAMEADQPVSLTNMPDEGVMVTKFYFQEDE

SEQ ID NO: 162 - protein, 204 aa, Artificial Sequence
  Description of Artificial Sequence: Synthetic fusion protein GI-8
YAPGTFISDYSIAMDKIHQQDFVNWLLAQKGKKNDWKHNITQGGGGSGGGGSRPSGRKSSKMQAFRIWDVNQKTFYLRNNQLVAGYLQGPNVNLEEKIDVVPIEPHALFLGIHGGKMCLSCVKSGDETRLQLEAVNITDLSENRKQDKRFAFIRSDSGPTTSFESAACPGWFLCTAMEADQPVSLTNMPDEGVMVTKFYFQEDE

SEQ ID NO: 163 - protein, 209 aa, Artificial Sequence
  Description of Artificial Sequence: Synthetic fusion protein GI-9
YAPGTFISDYSIAMDKIHQQDFVNWLLAQKGKKNDWKHNITQGGGGSGGGGSGGGGSRPSGRKSSKMQAFRIWDVNQKTFYLRNNQLVAGYLQGPNVNLEEKIDVVPIEPHALFLGIHGGKMCLSCVKSGDETRLQLEAVNITDLSENRKQDKRFAFIRSDSGPTTSFESAACPGWFLCTAMEADQPVSLTNMPDEGVMVTKFYFQEDE

SEQ ID NO: 164 - protein, 195 aa, Artificial Sequence
  Description of Artificial Sequence: Synthetic fusion protein IN-10
ISDYSIAMDKIHQQDFVNWLLAQKPSSGAPPPSGGGGSGGGGSRPSGRKSSKMQAFRIWDVNQKTFYLRNNQLVAGYLQGPNVNLEEKIDVVPIEPHALFLGIHGGKMCLSCVKSGDETRLQLEAVNITDLSENRKQDKRFAFIRSDSGPTTSFESAACPGWFLCTAMEADQPVSLTNMPDEGVMVTKFYFQEDE

SEQ ID NO: 165 - protein, 206 aa, Artificial Sequence
  Description of Artificial Sequence: Synthetic fusion protein GI-11
YGEGTFISDYSIAMDKIHQQDFVNWLLAQKPSSGAPPPSGGGGSGGGGSGGGGSRPSGRKSSKMQAFRIWDVNQKTFYLRNNQLVAGYLQGPNVNLEEKIDVVPIEPHALFLGIHGGKMCLSCVKSGDETRLQLEAVNITDLSENRKQDKRFAFIRSDSGPTTSFESAACPGWFLCTAMEADQPVSLTNMPDEGVMVTKFYFQEDE

SEQ ID NO: 166 - protein, 196 aa, Artificial Sequence
  Description of Artificial Sequence: Synthetic fusion protein GI-12
YGEGTFISDYSIAMDKIHQQDFVNWLLAQKPSSGAPPPSGGGGSRPSGRKSSKMQAFRIWDVNQKTFYLRNNQLVAGYLQGPNVNLEEKIDVVPIEPHALFLGIHGGKMCLSCVKSGDETRLQLEAVNITDLSENRKQDKRFAFIRSDSGPTTSFESAACPGWFLCTAMEADQPVSLTNMPDEGVMVTKFYFQEDE

SEQ ID NO: 167 - protein, 206 aa, Artificial Sequence
  Description of Artificial Sequence: Synthetic fusion protein GI-13
YAEGTFISDYSIAMDKIHQQDFVNWLLAQKPSSGAPPPSGGGGSGGGGSGGGGSRPSGRKSSKMQAFRIWDVNQKTFYLRNNQLVAGYLQGPNVNLEEKIDVVPIEPHALFLGIHGGKMCLSCVKSGDETRLQLEAVNITDLSENRKQDKRFAFIRSDSGPTTSFESAACPGWFLCTAMEADQPVSLTNMPDEGVMVTKFYFQEDE

SEQ ID NO: 168 - protein, 201 aa, Artificial Sequence
  Description of Artificial Sequence: Synthetic fusion protein GI-14
YAEGTFISDYSIAMDKIHQQDFVNWLLAQKPSSGAPPPSGGGGSGGGGSRPSGRKSSKMQAFRIWDVNQKTFYLRNNQLVAGYLQGPNVNLEEKIDVVPIEPHALFLGIHGGKMCLSCVKSGDETRLQLEAVNITDLSENRKQDKRFAFIRSDSGPTTSFESAACPGWFLCTAMEADQPVSLTNMPDEGVMVTKFYFQEDE

SEQ ID NO: 169 - protein, 196 aa, Artificial Sequence
  Description of Artificial Sequence: Synthetic fusion protein GI-15
YAEGTFISDYSIAMDKIHQQDFVNWLLAQKPSSGAPPPSGGGGSRPSGRKSSKMQAFRIWDVNQKTFYLRNNQLVAGYLQGPNVNLEEKIDVVPIEPHALFLGIHGGKMCLSCVKSGDETRLQLEAVNITDLSENRKQDKRFAFIRSDSGPTTSFESAACPGWFLCTAMEADQPVSLTNMPDEGVMVTKFYFQEDE

SEQ ID NO: 170 - protein, 187 aa, Artificial Sequence
  Description of Artificial Sequence: Synthetic fusion protein GI-16
FISDYSIAMDKIHQQDFVNWLLAQKGGGGSGGGGSRPSGRKSSKMQAFRIWDVNQKTFYLRNNQLVAGYLQGPNVNLEEKIDVVPIEPHALFLGIHGGKMCLSCVKSGDETRLQLEAVNITDLSENRKQDKRFAFIRSDSGPTTSFESAACPGWFLCTAMEADQPVSLTNMPDEGVMVTKFYFQEDE

SEQ ID NO: 171 - protein, 182 aa, Artificial Sequence
  Description of Artificial Sequence: Synthetic fusion protein GI-17
FISDYSIAMDKIHQQDFVNWLLAQKGGGGSRPSGRKSSKMQAFRIWDVNQKTFYLRNNQLVAGYLQGPNVNLEEKIDVVPIEPHALFLGIHGGKMCLSCVKSGDETRLQLEAVNITDLSENRKQDKRFAFIRSDSGPTTSFESAACPGWFLCTAMEADQPVSLTNMPDEGVMVTKFYFQEDE

SEQ ID NO: 172 - protein, 196 aa, Artificial Sequence
  Description of Artificial Sequence: Synthetic fusion protein GI-18
FISDYSIAMDKIHQQDFVNWLLAQKPSSGAPPPSGGGGSGGGGSRPSGRKSSKMQAFRIWDVNQKTFYLRNNQLVAGYLQGPNVNLEEKIDVVPIEPHALFLGIHGGKMCLSCVKSGDETRLQLEAVNITDLSENRKQDKRFAFIRSDSGPTTSFESAACPGWFLCTAMEADQPVSLTNMPDEGVMVTKFYFQEDE

SEQ ID NO: 173 - protein, 182 aa, Artificial Sequence
  Description of Artificial Sequence: Synthetic fusion protein GI-19
YAPGTFISDYSIAMDKIHQQDFVNWLLAQKRPSGRKSSKMQAFRIWDVNQKTFYLRNNQLVAGYLQGPNVNLEEKIDVVPIEPHALFLGIHGGKMCLSCVKSGDETRLQLEAVNITDLSENRKQDKRFAFIRSDSGPTTSFESAACPGWFLCTAMEADQPVSLTNMPDEGVMVTKFYFQEDE

SEQ ID NO: 174 - protein, 196 aa, Artificial Sequence
  Description of Artificial Sequence: Synthetic fusion protein GI-20
YAPGTFISDYSIAMDKIHQQDFVNWLLAQKPSSGAPPPSGGGGSRPSGRKSSKMQAFRIWDVNQKTFYLRNNQLVAGYLQGPNVNLEEKIDVVPIEPHALFLGIHGGKMCLSCVKSGDETRLQLEAVNITDLSENRKQDKRFAFIRSDSGPTTSFESAACPGWFLCTAMEADQPVSLTNMPDEGVMVTKFYFQEDE

SEQ ID NO: 175 - protein, 201 aa, Artificial Sequence
  Description of Artificial Sequence: Synthetic fusion protein GI-21
YAPGTFISDYSIAMDKIHQQDFVNWLLAQKPSSGAPPPSGGGGSGGGGSRPSGRKSSKMQAFRIWDVNQKTFYLRNNQLVAGYLQGPNVNLEEKIDVVPIEPHALFLGIHGGKMCLSCVKSGDETRLQLEAVNITDLSENRKQDKRFAFIRSDSGPTTSFESAACPGWFLCTAMEADQPVSLTNMPDEGVMVTKFYFQEDE

SEQ ID NO: 176 - protein, 789 aa, Artificial Sequence
  Description of Artificial Sequence: Synthetic fusion protein GI-22
YAEGTFISDYSIAMDKIHQQDFVNWLLAQKGKKNDWKHNITQGGGGSRPSGRKSSKMQAFRIWDVNQKTFYLRNNQLVAGYLQGPNVNLEEKIDVVPIEPHALFLGIHGGKMCLSCVKSGDETRLQLEAVNITDLSENRKQDKRFAFIRSDSGPTTSFESAACPGWFLCTAMEADQPVSLTNMPDEGVMVTKFYFQEDEGGGGSDAHKSEVAHRFKDLGEENFKALVLIAFAQYLQQCPFEDHVKLVNEVTEFAKTCVADESAENCDKSLHTLFGDKLCTVATLRETYGEMADCCAKQEPERNECFLQHKDDNPNLPRLVRPEVDVMCTAFHDNEETFLKKYLYEIARRHPYFYAPELLFFAKRYKAAFTECCQAADKAACLLPKLDELRDEGKASSAKQRLKCASLQKFGERAFKAWAVARLSQRFPKAEFAEVSKLVTDLTKVHTECCHGDLLECADDRADLAKYICENQDSISSKLKECCEKPLLEKSHCIAEVENDEMPADLPSLAADFVESKDVCKNYAEAKDVFLGMFLYEYARRHPDYSVVLLLRLAKTYETTLEKCCAAADPHECYAKVFDEFKPLVEEPQNLIKQNCELFEQLGEYKFQNALLVRYTKKVPQVSTPTLVEVSRNLGKVGSKCCKHPEAKRMPCAEDYLSVVLNQLCVLHEKTPVSDRVTKCCTESLVNRRPCFSALEVDETYVPKEFNAETFTFHADICTLSEKERQIKKQTALVELVKHKPKATKEQLKAVMDDFAAFVEKCCKADDKETCFAEEGKKLVAASQAALGL

SEQ ID NO: 177 - protein, 789 aa, Artificial Sequence
  Description of Artificial Sequence: Synthetic fusion protein GI-23
YAPGTFISDYSIAMDKIHQQDFVNWLLAQKGKKNDWKHNITQGGGGSRPSGRKSSKMQAFRIWDVNQKTFYLRNNQLVAGYLQGPNVNLEEKIDVVPIEPHALFLGIHGGKMCLSCVKSGDETRLQLEAVNITDLSENRKQDKRFAFIRSDSGPTTSFESAACPGWFLCTAMEADQPVSLTNMPDEGVMVTKFYFQEDEGGGGSDAHKSEVAHRFKDLGEENFKALVLIAFAQYLQQCPFEDHVKLVNEVTEFAKTCVADESAENCDKSLHTLFGDKLCTVATLRETYGEMADCCAKQEPERNECFLQHKDDNPNLPRLVRPEVDVMCTAFHDNEETFLKKYLYEIARRHPYFYAPELLFFAKRYKAAFTECCQAADKAACLLPKLDELRDEGKASSAKQRLKCASLQKFGERAFKAWAVARLSQRFPKAEFAEVSKLVTDLTKVHTECCHGDLLECADDRADLAKYICENQDSISSKLKECCEKPLLEKSHCIAEVENDEMPADLPSLAADFVESKDVCKNYAEAKDVFLGMFLYEYARRHPDYSVVLLLRLAKTYETTLEKCCAAADPHECYAKVFDEFKPLVEEPQNLIKQNCELFEQLGEYKFQNALLVRYTKKVPQVSTPTLVEVSRNLGKVGSKCCKHPEAKRMPCAEDYLSVVLNQLCVLHEKTPVSDRVTKCCTESLVNRRPCFSALEVDETYVPKEFNAETFTFHADICTLSEKERQIKKQTALVELVKHKPKATKEQLKAVMDDFAAFVEKCCKADDKETCFAEEGKKLVAASQAALGL

SEQ ID NO: 178 - protein, 153 aa, Artificial Sequence
  Description of Artificial Sequence: Synthetic fusion protein GI-24
  MOD_RES (85)..(85): S-maleimide-PEG11-maleimide-S-GIP receptor binding polypeptide,S is the sulphur atom on the side chain of a cysteine residue, wherein the GIP receptor binding polypeptide has a sequence of SEQ ID NO: 197
MRPSGRKSSKMQAFRIWDVNQKTFYLRNNQLVAGYLQGPNVNLEEKIDVVPIEPHALFLGIHGGKMCLSCVKSGDETRLQLEAVCITDLSENRKQDKRFAFIRSDSGPTTSFESAASPGWFLCTAMEADQPVSLTNMPDEGVMVTKFYFQEDE

SEQ ID NO: 179 - protein, 152 aa, Artificial Sequence; identical to SEQ ID NO: 52
  Description of Artificial Sequence: Synthetic fusion protein GI-25
  MOD_RES (116)..(116): S-maleimide-PEG40K -maleimide-S-GIP receptor binding polypeptide,S is the sulphur atom on the side chain of a cysteine residue; wherein the GIP receptor binding polypeptide has a sequence of SEQ ID NO: 198

SEQ ID NO: 180 - protein, 152 aa, Artificial Sequence; identical to SEQ ID NO: 52
  Description of Artificial Sequence: Synthetic fusion protein GI-26
  MOD_RES (116)..(116): S-maleimide-PEG40K -maleimide-S-GIP receptor binding polypeptide,S is the sulphur atom on the side chain of a cysteine residue; wherein the GIP receptor binding polypeptide has a sequence of SEQ ID NO: 199

SEQ ID NO: 181 - protein, 154 aa, Artificial Sequence; identical to SEQ ID NO: 144
  Description of Artificial Sequence: Synthetic fusion protein GI-27
  MOD_RES (154)..(154): S-maleimide-PEG11-maleimide-S-GIP receptor binding polypeptide, S is the sulphur atom on the side chain of a cysteine residue,wherein the sequence of the GIP receptor binding polypeptide is SEQ ID NO:200

SEQ ID NO: 182 - protein, 153 aa, Artificial Sequence
  Description of Artificial Sequence: Synthetic fusion protein GI-28
  MOD_RES (1)..(1): S-maleimide-PEG11-maleimide-S-GIP receptor binding polypeptide,S is the sulphur atom on the side chain of a cysteine residue,wherein the GIP receptor binding polypeptide has a sequence of SEQ ID NO:201
  MOD_RES (117)..(117): S-CH2-CONH-(CH2CH2O)4-(CH2)2-NH-(Nalpha-(HOOC(CH2)16CO) -gamma-Glu)
CRPSGRKSSKMQAFRIWDVNQKTFYLRNNQLVAGYLQGPNVNLEEKIDVVPIEPHALFLGIHGGKMCLSCVKSGDETRLQLEAVNITDLSENRKQDKRFAFIRSDSGPTTSFESAACPGWFLCTAMEADQPVSLTNMPDEGVMVTKFYFQEDE

SEQ ID NO: 183 - protein, 153 aa, Artificial Sequence; identical to SEQ ID NO: 178
  Description of Artificial Sequence: Synthetic fusion protein GI-29
  MOD_RES (85)..(85): S-maleimide-PEG40K-maleimide-S-GIP receptor binding polypeptide,S is the sulphur atom on the side chain of a cysteine residue,wherein the GIP receptor binding polypeptide has a sequence of SEQ ID NO:202

SEQ ID NO: 184 - protein, 152 aa, Artificial Sequence; identical to SEQ ID NO: 52
  Description of Artificial Sequence: Synthetic fusion protein GI-30
  MOD_RES (116)..(116): S-maleimide-PEG11-maleimide-S-GIP receptor binding polypeptide,S is the sulphur atom on the side chain of a cysteine residue, wherein the GIP receptor binding polypeptide has a sequence of SEQ ID NO:203

SEQ ID NO: 185 - protein, 39 aa, Unknown
  Description of Unknown: GLP-1 receptor binding polypeptide
HGEGTFTSDLSKQMEEEAVRLFIEWLKNGGPSSGAPPPC

SEQ ID NO: 186 - protein, 31 aa, Unknown
  Description of Unknown: GLP-1 receptor binding polypeptide
HGEGTFTSDVSSYLEEQAAKEFIAWLVKGRC

SEQ ID NO: 187 - protein, 31 aa, Unknown
  Description of Unknown: GLP-1 receptor binding polypeptide
HGEGTFTSDVSSYLEEQAAKEFIAWLVCGRG

SEQ ID NO: 188 - protein, 39 aa, Unknown
  Description of Unknown: GLP-1 receptor binding polypeptide
HGEGTFTSDLSKQMEEEAVRLFIEWLCNGGPSSGAPPPS

SEQ ID NO: 189 - protein, 31 aa, Unknown
  Description of Unknown: GLP-1 receptor binding polypeptide
  MOD_RES (2)..(2): 2-methyl-alanine
HXEGTFTSDVSSYLEGQAAKEFIAWLVKGRC

SEQ ID NO: 190 - protein, 31 aa, Unknown
  Description of Unknown: GLP-1 receptor binding polypeptide
  MOD_RES (2)..(2): 2-methyl-alanine
HXEGTFTSDVSSYLEGQAAKEFIAWLVCGRG

SEQ ID NO: 191 - protein, 31 aa, Unknown
  Description of Unknown: GLP-1 receptor binding polypeptide
  MOD_RES (2)..(2): 2-methyl-alanine
HXEGTFTSDVSSYLEEQAAKEFIAWLVKGRC

SEQ ID NO: 192 - protein, 31 aa, Unknown
  Description of Unknown: GLP-1 receptor binding polypeptide
  MOD_RES (2)..(2): 2-methyl-alanine
HXEGTFTSDVSSYLEGQAACEFIAWLVKGRG

SEQ ID NO: 193 - protein, 31 aa, Unknown
  Description of Unknown: GLP-1 receptor binding polypeptide
  MOD_RES (20)..(20): NEpsilon-(Nalpha-(HOOC(CH2)14CO)-gamma-L-Glu)
HAEGTFTSDVSSYLEGQAAKEFIAWLVRGRC

SEQ ID NO: 194 - protein, 152 aa, Unknown; identical to SEQ ID NO: 52
  Description of Unknown: IL-1ra polypeptide

SEQ ID NO: 195 - protein, 152 aa, Unknown; identical to SEQ ID NO: 51
  Description of Unknown: interleukin-1 receptor antagonistic protein

SEQ ID NO: 196 - protein, 153 aa, Unknown; identical to SEQ ID NO: 67
  Description of Unknown: IL-1ra

SEQ ID NO: 197 - protein, 42 aa, Unknown
  Description of Unknown: GIP receptor binding polypeptide
YAEGTFISDYSIAMDKIHQQDFVNWLLAQKGKKNDWCHNITQ

SEQ ID NO: 198 - protein, 43 aa, Unknown
  Description of Unknown: GIP receptor binding polypeptide
YAEGTFISDYSIAMDKIHQQDFVNWLLAQKGKKNDWKHNITQC

SEQ ID NO: 199 - protein, 43 aa, Unknown
  Description of Unknown: GIP receptor binding polypeptide
YAPGTFISDYSIAMDKIHQQDFVNWLLAQKGKKNDWKHNITQC

SEQ ID NO: 200 - protein, 30 aa, Unknown
  Description of Unknown: GIP receptor binding polypeptide
  MOD_RES (2)..(2): 2-methyl-alanine
YXEGTFISDYSIAMDKIHQQDFVNWLLAQC

SEQ ID NO: 201 - protein, 40 aa, Unknown
  Description of Unknown: GIP receptor binding polypeptide
  MOD_RES (2)..(2): 2-methyl-alanine
YXEGTFISDYSIAMDKIHQQDFVNWLLAQKPSSGAPPPSC

SEQ ID NO: 202 - protein, 39 aa, Unknown
  Description of Unknown: GIP receptor binding polypeptide
YAEGTFISDYSIAMDKIHQQDFVNWLLAQKPSSGAPPPC

SEQ ID NO: 203 - protein, 26 aa, Unknown
  Description of Unknown: GIP receptor binding polypeptide
FISDYSIAMDKIHQQDFVNWLLAQKC

SEQ ID NO: 204 - protein, 153 aa, Unknown
  Description of Unknown: interleukin-1 receptor antagonistic protein or an analogue thereof
  MOD_RES (1)..(1): methionine, a cysteine, general formula 1, general formula 2, or absent
  MOD_RES (67)..(67): cysteine or serine
  MOD_RES (70)..(70): cysteine or serine
  MOD_RES (85)..(85): cysteine or asparagine
  MOD_RES (117)..(117): cysteine or serine
  MOD_RES (123)..(123): cysteine or serine
XRPSGRKSSKMQAFRIWDVNQKTFYLRNNQLVAGYLQGPNVNLEEKIDVVPIEPHALFLGIHGGKMXLSXVKSGDETRLQLEAVXITDLSENRKQDKRFAFIRSDSGPTTSFESAAXPGWFLXTAMEADQPVSLTNMPDEGVMVTKFYFQEDE

SEQ ID NO: 205 - protein, 30 aa, Homo sapiens
  human GLP-1 (7-36)
HAEGTFTSDVSSYLEGQAAKEFIAWLVKGR

SEQ ID NO: 206 - protein, 31 aa, Homo sapiens
  human GLP-1 (7-37)
HAEGTFTSDVSSYLEGQAAKEFIAWLVKGRG

SEQ ID NO: 207 - protein, 31 aa, Unknown
  Description of Unknown: GLP-1 receptor antagonist
DLSKQMEEEAVRLFIEWLKNGGPSSGAPPPS

SEQ ID NO: 208 - protein, 30 aa, Unknown
  Description of Unknown: GLP-1 receptor antagonist
HAKGTFTSDVSSYLEGQAAKEFIAWLVKGR

SEQ ID NO: 209 - protein, 28 aa, Unknown
  Description of Unknown: GLP-1 receptor antagonist
EGTFTSDVSSYLEGQAAKEFIAWLVKGR

SEQ ID NO: 210 - protein, 29 aa, Unknown
  Description of Unknown: GLP-1 receptor antagonist
AEGTFTSEVSSYLEGQAAKEFIAWLVKGR

SEQ ID NO: 211 - protein, 31 aa, Unknown
  Description of Unknown: Liraglutide peptide
HAEGTFTSDVSSYLEGQAAKEFIAWLVRGRG

SEQ ID NO: 212 - protein, 44 aa, Unknown
  Description of Unknown: Lixisenatide polypeptide
HGEGTFTSDLSKQMEEEAVRLFIEWLKNGGPSSGAPPSKKKKKK

SEQ ID NO: 213 - protein, 27 aa, Unknown
  Description of Unknown: Taspoglutide peptide
HEGTFTSDVSSYLEGQAAKEFIAWLVK

SEQ ID NO: 214 - protein, 39 aa, Unknown
  Description of Unknown: Exenatide peptide
HGEGTFTSDLSKQMEEEAVRLFIEWLKNGGPSSGAPPPS

SEQ ID NO: 215 - protein, 39 aa, Unknown
  Description of Unknown: Exendin-3 peptide
HSDGTFTSDLSKQMEEEAVRLFIEWLKNGGPSSGAPPPS

SEQ ID NO: 216 - protein, 42 aa, Homo sapiens
YAEGTFISDYSIAMDKIHQQDFVNWLLAQKGKKNDWKHNITQ

SEQ ID NO: 217 - protein, 153 aa, Homo sapiens
MRPSGRKSSKMQAFRIWDVNQKTFYLRNNQLVAGYLQGPNVNLEEKIDVVPIEPHALFLGIHGGKMCLSCVKSGDETRLQLEAVNITDLSENRKQDKRFAFIRSDSGPTTSFESAACPGWFLCTAMEADQPVSLTNMPDEGVMVTKFYFQEDE

SEQ ID NO: 218 - protein, 152 aa, Homo sapiens; identical to SEQ ID NO: 52

SEQ ID NO: 219 - protein, 153 aa, Unknown; identical to SEQ ID NO: 67
  Description of Unknown: IL-1ra analogue

SEQ ID NO: 220 - protein, 153 aa, Unknown; identical to SEQ ID NO: 182
  Description of Unknown: IL-1ra analogue

SEQ ID NO: 221 - protein, 153 aa, Unknown
  Description of Unknown: IL-1ra analogue
CRPSGRKSSKMQAFRIWDVNQKTFYLRNNQLVAGYLQGPNVNLEEKIDVVPIEPHALFLGIHGGKMCLSCVKSGDETRLQLEAVCITDLSENRKQDKRFAFIRSDSGPTTSFESAASPGWFLCTAMEADQPVSLTNMPDEGVMVTKFYFQEDE

SEQ ID NO: 222 - protein, 152 aa, Unknown; identical to SEQ ID NO: 51
  Description of Unknown: IL-1ra analogue

SEQ ID NO: 223 - protein, 152 aa, Unknown
  Description of Unknown: IL-1ra analogue
RPSGRKSSKMQAFRIWDVNQKTFYLRNNQLVAGYLQGPNVNLEEKIDVVPIEPHALFLGIHGGKMCLSCVKSGDETRLQLEAVCITDLSENRKQDKRFAFIRSDSGPTTSFESAACPGWFLCTAMEADQPVSLTNMPDEGVMVTKFYFQEDE

SEQ ID NO: 224 - protein, 152 aa, Unknown
  Description of Unknown: IL-1ra analogue
RPSGRCSSKMQAFRIWDVNQKTFYLRNNQLVAGYLQGPNVNLEEKIDVVPIEPHALFLGIHGGKMCLSCVKSGDETRLQLEAVNITDLSENRKQDKRFAFIRSDSGPTTSFESAASPGWFLCTAMEADQPVSLTNMPDEGVMVTKFYFQEDE

SEQ ID NO: 225 - protein, 152 aa, Unknown
  Description of Unknown: IL-1ra analogue
RPSGRCSSKMQAFRIWDVNQKTFYLRNNQLVAGYLQGPNVNLEEKIDVVPIEPHALFLGIHGGKMCLSCVKSGDETRLQLEAVNITDLSENRKQDKRFAFIRSDSGPTTSFESAACPGWFLCTAMEADQPVSLTNMPDEGVMVTKFYFQEDE

SEQ ID NO: 226 - protein, 152 aa, Unknown
  Description of Unknown: IL-1ra analogue
RPSGRKSCKMQAFRIWDVNQKTFYLRNNQLVAGYLQGPNVNLEEKIDVVPIEPHALFLGIHGGKMCLSCVKSGDETRLQLEAVNITDLSENRKQDKRFAFIRSDSGPTTSFESAASPGWFLCTAMEADQPVSLTNMPDEGVMVTKFYFQEDE

SEQ ID NO: 227 - protein, 152 aa, Unknown
  Description of Unknown: IL-1ra analogue
RPSGRKSCKMQAFRIWDVNQKTFYLRNNQLVAGYLQGPNVNLEEKIDVVPIEPHALFLGIHGGKMCLSCVKSGDETRLQLEAVNITDLSENRKQDKRFAFIRSDSGPTTSFESAACPGWFLCTAMEADQPVSLTNMPDEGVMVTKFYFQEDE

SEQ ID NO: 228 - protein, 152 aa, Unknown
  Description of Unknown: IL-1ra analogue
RPSGRKSSCMQAFRIWDVNQKTFYLRNNQLVAGYLQGPNVNLEEKIDVVPIEPHALFLGIHGGKMCLSCVKSGDETRLQLEAVNITDLSENRKQDKRFAFIRSDSGPTTSFESAASPGWFLCTAMEADQPVSLTNMPDEGVMVTKFYFQEDE

SEQ ID NO: 229 - protein, 152 aa, Unknown
  Description of Unknown: IL-1ra analogue
RPSGRKSSCMQAFRIWDVNQKTFYLRNNQLVAGYLQGPNVNLEEKIDVVPIEPHALFLGIHGGKMCLSCVKSGDETRLQLEAVNITDLSENRKQDKRFAFIRSDSGPTTSFESAACPGWFLCTAMEADQPVSLTNMPDEGVMVTKFYFQEDE

SEQ ID NO: 230 - protein, 152 aa, Unknown
  Description of Unknown: IL-1ra analogue
RPSGRKSSKMQAFRIWDVNQKTFYLRNNQLVAGYLQGPNVNLEEKIDVVPIEPHALFLGIHGGKMCLSCVKSGDETRLQLEAVNITDLSENRKQDKRFAFIRSDSGPTTSFESAASPGWFLCTAMEADQPVSLTNMPDEGCMVTKFYFQEDE

SEQ ID NO: 231 - protein, 31 aa, Unknown
  Description of Unknown: GLP-1 receptor binding polypeptide
  MOD_RES (1)..(1): histidine, D-histidine, deamino-histidine, Beta-hydroxyl-histidine, homohistidine, alpha-fluoromethyl- histidine, alpha-methyl-histidine, N-methyl-histidine, Nalpha-acetyl-histidine, alpha-methyl-histidine,
  MOD_RES (1)..(1): 2-pyridinyl-alanine, 3-pyridinyl-alanine, 4-pyridinyl-alanine, imidazopropionyl
  MOD_RES (2)..(2): 2-methylalanine (Aib), glycine, D-serine, serine, threonine, leucine, isoleucine, alanine, valine, aminocyclopropane- carboxylic acid, aminocyclobutanecarboxylic acid, aminocyclopentanecarboxylic acid, aminocyclohexane-
  MOD_RES (2)..(2): carboxylic acid, 2-methylalanine (Aib), glycine, D-serine, serine, threonine, aminocycloheptanecarboxylic acid, or aminocyclooctanecarboxylic acid
  MOD_RES (3)..(3): glutamic acid, aspartic acid, or glutamine
  MOD_RES (5)..(5): threonine, aspartic acid, glutamic acid, arginine, alanine, lysine, or histidine
  MOD_RES (6)..(6): phenylalanine, tyrosine, tryptophan, or histidine
  MOD_RES (10)..(10): valine, tyrosine, phenylalanine, tryptophan, histidine, leucine, isoleucine, serine, threonine, aspartic acid, glutamic acid, alanine, lysine, arginine, cysteine, general formula 1, or general formula 2
  MOD_RES (12)..(12): serine, isoleucine, lysine, arginine, cysteine, general formula 1, or general formula 2
  MOD_RES (16)..(16): glycine, serine, histidine, glutamic acid, aspartic acid, glutamine, asparagine, lysine, arginine, homoglutamic acid, cysteine, homocysteine, or cysteic acid
  MOD_RES (17)..(17): glutamine, arginine, isoleucine, glutamic acid, aspartic acid, histidine, lysine, cysteine, general formula 1, or general formula 2
  MOD_RES (18)..(18): alanine, arginine, histidine, glutamic acid, or lysine
  MOD_RES (20)..(20): lysine, arginine, aspartic acid, glutamic acid, glutamine, histidine, 2-methylalanine, cysteine, general formula 1, or general formula 2
  MOD_RES (21)..(21): aspartic acid, glutamic acid, leucine, alanine, lysine, cysteine, general formula 1, or general formula 2
  MOD_RES (24)..(24): alanine, glutamine, asparagine, glutamic acid, aspartic acid, serine, or histidine
  MOD_RES (25)..(25): alanine, tryptophan, phenylalanine, tyrosine, cysteine, lysine, general formula 1, or general formula 2
  MOD_RES (27)..(27): valine, leucine, lysine, arginine, alanine, glycine, cysteine, general formula 1, or general formula 2
  MOD_RES (28)..(28): lysine, arginine, aspartic acid, glutamic acid, alanine, asparagine, cysteine, general formula 1, or general formula 2
  MOD_RES (29)..(29): glycine, glutamine, threonine, serine, lysine, arginine, cysteine, general formula 1, or general formula 2
  MOD_RES (30)..(30): arginine, lysine, glycine, histidine, cysteine, general formula 1, or general formula 2
  MOD_RES (31)..(31): -NH2, glycine, threonine, serine, aspartic acid, glutamic acid, tryptophan, tyrosine, phenylalanine, histidine, arginine, lysine, cysteine, a linking or spacer group, general formula 3, general formula 4 or a linking or
  MOD_RES (31)..(31): spacer group +XG32
XXXGXXTSDXSXYLEXXXAXXFIXXLXXXXX

SEQ ID NO: 232 - protein, 31 aa, Unknown
  Description of Unknown: GLP-1 receptor binding polypeptide
  MOD_RES (2)..(2): Xaa can be any naturally occurring amino acid
  MOD_RES (10)..(10): Xaa can be any naturally occurring amino acid
  MOD_RES (16)..(16): Xaa can be any naturally occurring amino acid
  MOD_RES (20)..(20): Xaa can be any naturally occurring amino acid
  MOD_RES (28)..(28): Xaa can be any naturally occurring amino acid
  MOD_RES (31)..(31): Xaa can be any naturally occurring amino acid
HXEGTFTSDXSSYLEXQAAXEFIAWLVXGRX

SEQ ID NO: 233 - protein, 39 aa, Unknown
  Description of Unknown: GLP-1 receptor binding polypeptide
  MOD_RES (1)..(1): histidine, D-histidine, deamino-histidine, Beta-hydroxyl-histidine, homohistidine, alpha-fluoromethyl- histidine, alpha-methyl-histidine, N-methyl-histidine, Nalpha-acetyl-histidine,
  MOD_RES (1)..(1): alpha-methyl-histidine, 2-pyridinyl-alanine, 3-pyridinyl- alanine, 4-pyridinyl-alanine, imidazopropionyl, arginine, or tyrosine
  MOD_RES (2)..(2): glycine, alanine, 2-methylalanine, D-serine, serine, threonine, leucine, isoleucine, valine, aminocyclopropanecarboxylic acid, aminocyclobutanecarboxylic acid, aminocyclopentanecarboxylic acid,
  MOD_RES (2)..(2): aminocyclohexanecarboxylic acid, aminocycloheptanecarboxylic acid, or aminocyclooctanecarboxylic acid
  MOD_RES (3)..(3): aspartic acid, glutamic acid, or glutamine
  MOD_RES (6)..(6): phenylalanine, alanine, tyrosine, or naphthylalanine
  MOD_RES (10)..(10): leucine, isoleucine, tyrosine, valine, alanine, lysine, cysteine, general formula 1, general formula 2, or pentaglycine
  MOD_RES (12)..(12): lysine, cysteine, arginine, serine, isoleucine, or general formula 1, or general formula 2
  MOD_RES (13)..(13): glutamine, alanine, or tyrosine
  MOD_RES (14)..(14): methionine, leucine, norleucine, isoleucine, alanine, valine, or general formula 1, or general formula 2
  MOD_RES (16)..(16): glutamic acid, aspartic acid, serine, glycine, lysine, or arginine
  MOD_RES (17)..(17): glutamic acid, glutamine, arginine, or isoleucine
  MOD_RES (19)..(19): valine, alanine, or glutamine
  MOD_RES (20)..(20): lysine, glutamine, cysteine, arginine, general formula 1, or general formula 2
  MOD_RES (21)..(21): leucine, glutamic acid, or aspartic acid
  MOD_RES (23)..(23): isoleucine, leucine, valine, pentaglycine
  MOD_RES (24)..(24): alanine, glutamic acid, aspartic acid, asparagine, or glutamine
  MOD_RES (25)..(25): alanine, tryptophan, phenylalanine, tyrosine, cysteine, lysine, naphthylalanine, general formula 1, or general formula2
  MOD_RES (27)..(27): lysine, cysteine, asparagine, leucine, valine, arginine, general formula 1, or general formula 2
  MOD_RES (28)..(28): asparagine, lysine, cysteine, arginine, alanine, general formula 1, or general formula 2
  MOD_RES (29)..(29): -NH2, glycine, glutamine, threonine, lysine, cysteine, or absent
  MOD_RES (30)..(30): -NH2, glycine, tyrosine, arginine, lysine, cysteine, general formula 1, general formula 2, or absent
  MOD_RES (31)..(31): -NH2, glycine, proline, homoproline, thioproline, N-alkyl alanine, or absent
  MOD_RES (32)..(32): serine, lysine, cysteine, deletion, general formula 1, or general formula 2
  MOD_RES (33)..(33): serine, lysine, cysteine, general formula 1, general formula 2, or absent
  MOD_RES (34)..(34): glycine, absent, general formula 1, or general formula 2
  MOD_RES (35)..(35): alanine, lysine, cysteine, general formula 1, general formula 2, or absent
  MOD_RES (36)..(36): proline, homoproline, thioproline, N-alkyl alanine, or absent
  MOD_RES (37)..(37): proline, homoproline, thioproline, N-alkyl alanine, or absent
  MOD_RES (38)..(38): proline, homoproline, thioproline, N-alkylalanine, or absent
  MOD_RES (39)..(39): serine, serine-NH2, cysteine, cysteine-NH2, lysine, lysine-NH2, or absent or is a linking or spacer group + XE40, ,XE40 is a lysine, cysteine, general formula 3, or general formula 4
XXXGTXTSDXSXXXEXXAXXXFXXXLXXXXXXXXXXXXX

SEQ ID NO: 234 - protein, 39 aa, Unknown
  Description of Unknown: GLP-1 receptor binding polypeptide
  MOD_RES (1)..(1): histidine, D-histidine, deamino-histidine, Beta-hydroxyl-histidine, homohistidine, alpha-fluoromethyl- histidine, alpha-methyl-histidine, N-methyl-histidine, Nalpha-acetyl-histidine, alpha-methyl-histidine, 2-pyridinyl-
  MOD_RES (1)..(1): alanine, 3-pyridinyl-alanine, 4-pyridinyl-alanine, imidazopropionyl, arginine, or tyrosine
  MOD_RES (12)..(12): lysine, cysteine, arginine, serine, isoleucine, or general formula 1, or general formula 2
  MOD_RES (14)..(14): methionine, leucine, norleucine, isoleucine, alanine, valine, or general formula 1, or general formula 2
  MOD_RES (20)..(20): lysine, glutamine, cysteine, arginine, general formula 1, or general formula 2
  MOD_RES (27)..(27): lysine, cysteine, asparagine, leucine, valine, arginine, general formula 1, or general formula 2
  MOD_RES (28)..(28): asparagine, lysine, cysteine, arginine, alanine, general formula 1, or general formula 2
  MOD_RES (29)..(29): -NH2, glycine, glutamine, threonine, lysine, cysteine, or absent
  MOD_RES (30)..(30): -NH2, glycine, tyrosine, arginine, lysine, cysteine, general formula 1, general formula 2, or absent
  MOD_RES (31)..(31): -NH2, glycine, proline, homoproline, thioproline, N-alkyl alanine, or absent
  MOD_RES (32)..(32): serine, lysine, cysteine, deletion, general formula 1, or general formula 2
  MOD_RES (33)..(33): serine, lysine, cysteine, general formula 1, general formula 2, or absent
  MOD_RES (34)..(34): glycine, absent, general formula 1, or general formula 2
  MOD_RES (35)..(35): alanine, lysine, cysteine, general formula 1, general formula 2, or absent
  MOD_RES (36)..(36): proline, homoproline, thioproline, N-alkyl alanine, or absent
  MOD_RES (37)..(37): proline, homoproline, thioproline, N-alkyl alanine, or absent
  MOD_RES (38)..(38): proline, homoproline, thioproline, N-alkylalanine, or absent
  MOD_RES (39)..(39): serine, serine-NH2, cysteine, cysteine-NH2, lysine, lysine-NH2, or absent, or is a linking or spacer group + XE40, wherein XE40 is a lysine, cysteine, general formula 3, or general formula 4
XGEGTFTSDLSXQXEEEAVXLFIEWLXXXXXXXXXXXXX

SEQ ID NO: 235 - protein, 192 aa, Artificial Sequence
  Description of Artificial Sequence: Synthetic fusion protein
  MOD_RES (1)..(1): histidine, D-histidine, deamino-histidine, Beta-hydroxyl-histidine, homohistidine, alpha-fluoromethyl- histidine, alpha-methyl-histidine, N-methyl-histidine, Nalpha-acetyl-histidine, alpha-methyl-histidine, 2-
  MOD_RES (1)..(1): pyridinyl-alanine, 3-pyridinyl-alanine, 4-pyridinyl- alanine, imidazopropionyl, arginine, or tyrosine
  MOD_RES (2)..(2): glycine, alanine, 2-methylalanine, D-serine, serine, threonine, leucine, isoleucine, valine, aminocyclopropanecarboxylic acid, aminocyclobutane- carboxylic acid, aminocyclopentanecarboxylic acid,
  MOD_RES (2)..(2): aminocyclohexanecarboxylic acid, aminocycloheptane- carboxylic acid, or aminocyclooctanecarboxylic acid
  MOD_RES (3)..(3): aspartic acid, glutamic acid, or glutamine
  MOD_RES (6)..(6): phenylalanine, alanine, tyrosine, or naphthylalanine
  MOD_RES (10)..(10): leucine, isoleucine, tyrosine, valine, alanine, lysine, cysteine, general formula 1, general formula 2, or pentaglycine
  MOD_RES (12)..(12): lysine, cysteine, arginine, serine, isoleucine, or general formula 1, or general formula 2
  MOD_RES (13)..(13): glutamine, alanine, or tyrosine
  MOD_RES (14)..(14): methionine, leucine, norleucine, isoleucine, alanine, valine, or general formula 1, or general formula 2
  MOD_RES (16)..(16): glutamic acid, aspartic acid, serine, glycine, lysine, or arginine
  MOD_RES (17)..(17): glutamic acid, glutamine, arginine, or isoleucine
  MOD_RES (19)..(19): valine, alanine, or glutamine
  MOD_RES (20)..(20): lysine, glutamine, cysteine, arginine, general formula 1, or general formula 2
  MOD_RES (21)..(21): leucine, glutamic acid, or aspartic acid
  MOD_RES (23)..(23): isoleucine, leucine, valine, pentaglycine
  MOD_RES (24)..(24): alanine, glutamic acid, aspartic acid, asparagine, or glutamine
  MOD_RES (25)..(25): alanine, tryptophan, phenylalanine, tyrosine, cysteine, lysine, naphthylalanine, general formula 1, or general formula 2
  MOD_RES (27)..(27): lysine, cysteine, asparagine, leucine, valine, arginine, general formula 1, or general formula 2
  MOD_RES (28)..(28): asparagine, lysine, cysteine, arginine, alanine, general formula 1, or general formula 2
  MOD_RES (29)..(29): -NH2, glycine, glutamine, threonine, lysine, cysteine, or absent
  MOD_RES (30)..(30): -NH2, glycine, tyrosine, arginine, lysine, cysteine, general formula 1, general formula 2, or absent
  MOD_RES (31)..(31): -NH2, glycine, proline, homoproline, thioproline, N-alkyl alanine, or absent
  MOD_RES (32)..(32): serine, lysine, cysteine, deletion, general formula 1, or general formula 2
  MOD_RES (33)..(33): serine, lysine, cysteine, general formula 1, general formula 2, or absent
  MOD_RES (34)..(34): glycine, absent, general formula 1, or general formula 2
  MOD_RES (35)..(35): alanine, lysine, cysteine, general formula 1, general formula 2, or absent
  MOD_RES (36)..(36): proline, homoproline, thioproline, N-alkyl alanine, or absent
  MOD_RES (37)..(37): proline, homoproline, thioproline, N-alkyl alanine, or absent
  MOD_RES (38)..(38): proline, homoproline, thioproline, N-alkylalanine, or absent
  MOD_RES (39)..(39): serine, serine-NH2, cysteine, cysteine-NH2, lysine, lysine-NH2, or absent, or is a linking or spacer group + XE40, wherein XE40 is a lysine, cysteine, general formula 3, or general formula 4
  MOD_RES (39)..(40): Xaa 39 and Xaa 40 are linked by Lj, Lj is a linking group or spacer group
  MOD_RES (40)..(40): methionine, cysteine, general formula 1, general formula 2 or absent
  MOD_RES (106)..(106): cysteine or serine
  MOD_RES (109)..(109): cysteine or serine
  MOD_RES (124)..(124): cysteine or asparagine
  MOD_RES (156)..(156): cysteine or serine
  MOD_RES (162)..(162): cysteine or serine
XXXGTXTSDXSXXXEXXAXXXFXXXLXXXXXXXXXXXXXXRPSGRKSSKMQAFRIWDVNQKTFYLRNNQLVAGYLQGPNVNLEEKIDVVPIEPHALFLGIHGGKMXLSXVKSGDETRLQLEAVXITDLSENRKQDKRFAFIRSDSGPTTSFESAAXPGWFLXTAMEADQPVSLTNMPDEGVMVTKFYFQEDE

SEQ ID NO: 236 - protein, 192 aa, Artificial Sequence
  Description of Artificial Sequence: Synthetic fusion protein
  MOD_RES (1)..(1): histidine, D-histidine, deamino-histidine, Beta-hydroxyl-histidine, homohistidine, alpha-fluoromethyl- histidine, alpha-methyl-histidine, N-methyl-histidine, Nalpha-acetyl-histidine, alpha-methyl-histidine, 2-pyridinyl
  MOD_RES (1)..(1): -alanine, 3-pyridinyl-alanine, 4-pyridinyl-alanine, imidazopropionyl, arginine, or tyrosine
  MOD_RES (2)..(2): glycine, alanine, 2-methylalanine, D-serine, serine, threonine, leucine, isoleucine, valine, aminocyclopropanecarboxylic acid, aminocyclobutanecarboxylic acid, aminocyclopentanecarboxylic acid, aminocyclohexanecarboxylic acid, aminocycloheptane-
  MOD_RES (2)..(2): carboxylic acid, or aminocyclooctanecarboxylic acid
  MOD_RES (10)..(10): leucine, isoleucine, tyrosine, valine, alanine, lysine, cysteine, general formula 1, general formula 2, or pentaglycine
  MOD_RES (12)..(12): lysine, cysteine, arginine, serine, isoleucine, or general formula 1, or general formula 2
  MOD_RES (14)..(14): methionine, leucine, norleucine, isoleucine, alanine, valine, or general formula 1, or general formula 2
  MOD_RES (20)..(20): lysine, glutamine, cysteine, arginine, general formula 1, or general formula 2
  MOD_RES (27)..(27): lysine, cysteine, asparagine, leucine, valine, arginine, general formula 1, or general formula 2
  MOD_RES (28)..(28): asparagine, lysine, cysteine, arginine, alanine, general formula 1, or general formula 2
  MOD_RES (29)..(29): -NH2, glycine, glutamine, threonine, lysine, cysteine, or absent
  MOD_RES (30)..(30): -NH2, glycine, tyrosine, arginine, lysine, cysteine, general formula 1, general formula 2, or absent
  MOD_RES (31)..(31): -NH2, glycine, proline, homoproline, thioproline, N-alkyl alanine, or absent
  MOD_RES (32)..(32): serine, lysine, cysteine, deletion, general formula 1, or general formula 2
  MOD_RES (33)..(33): serine, lysine, cysteine, general formula 1, general formula 2, or absent
  MOD_RES (34)..(34): glycine, absent, general formula 1, or general formula 2
  MOD_RES (35)..(35): alanine, lysine, cysteine, general formula 1, general formula 2, or absent
  MOD_RES (36)..(36): proline, homoproline, thioproline, N-alkyl alanine, or absent
  MOD_RES (37)..(37): proline, homoproline, thioproline, N-alkyl alanine, or absent
  MOD_RES (38)..(38): proline, homoproline, thioproline, N-alkylalanine, or absent
  MOD_RES (39)..(39): serine, serine-NH2, cysteine, cysteine-NH2, lysine, lysine-NH2, or absent, or is a linking or spacer group + XE40, wherein XE40 is a lysine, cysteine, general formula 3, or general formula 4
  MOD_RES (39)..(40): Xaa 39 and Xaa 40 is linked by Lj, Lj is a linking group or spacer group
  MOD_RES (40)..(40): methionine, cysteine, general formula 1, general formula 2 or absent
  MOD_RES (106)..(106): cysteine or serine
  MOD_RES (109)..(109): cysteine or serine
  MOD_RES (124)..(124): cysteine or asparagine
  MOD_RES (156)..(156): cysteine or serine
  MOD_RES (162)..(162): cysteine or serine
XXEGTFTSDXSXQXEEEAVXLFIEWLXXXXXXXXXXXXXXRPSGRKSSKMQAFRIWDVNQKTFYLRNNQLVAGYLQGPNVNLEEKIDVVPIEPHALFLGIHGGKMXLSXVKSGDETRLQLEAVXITDLSENRKQDKRFAFIRSDSGPTTSFESAAXPGWFLXTAMEADQPVSLTNMPDEGVMVTKFYFQEDE

SEQ ID NO: 237 - protein, 192 aa, Artificial Sequence
  Description of Artificial Sequence: Synthetic fusion protein
  MOD_RES (2)..(2): glycine, alanine, 2-methylalanine, D-serine, serine, threonine, leucine, isoleucine, valine, aminocyclopropanecarboxylic acid, aminocyclobutanecarboxylic acid, aminocyclopentanecarboxylic acid,
  MOD_RES (2)..(2): aminocyclohexanecarboxylic acid, aminocycloheptanecarboxylic acid, or aminocyclooctanecarboxylic acid
  MOD_RES (10)..(10): leucine, isoleucine, tyrosine, valine, alanine, lysine, cysteine, general formula 1, general formula 2, or pentaglycine
  MOD_RES (12)..(12): lysine, cysteine, arginine, serine, isoleucine, or general formula 1, or general formula 2
  MOD_RES (14)..(14): methionine, leucine, norleucine, isoleucine, alanine, valine, or general formula 1, or general formula 2
  MOD_RES (20)..(20): lysine, glutamine, cysteine, arginine, general formula 1, or general formula 2
  MOD_RES (27)..(27): lysine, cysteine, asparagine, leucine, valine, arginine, general formula 1, or general formula 2
  MOD_RES (28)..(28): lysine, cysteine, asparagine, leucine, valine, arginine, general formula 1, or general formula 2
  MOD_RES (29)..(29): -NH2, glycine, glutamine, threonine, lysine, cysteine, or absent
  MOD_RES (30)..(30): -NH2, glycine, tyrosine, arginine, lysine, cysteine, general formula 1, general formula 2, or absent
  MOD_RES (31)..(39): P31 to Xaa 39 are repeated for 0 or 1 time
  MOD_RES (32)..(32): serine, lysine, cysteine, deletion, general formula 1, or general formula 2
  MOD_RES (33)..(33): serine, lysine, cysteine, general formula 1, general formula 2, or absent
  MOD_RES (35)..(35): alanine, lysine, cysteine, general formula 1, general formula 2, or absent
  MOD_RES (39)..(39): serine, serine-NH2, cysteine, cysteine-NH2, lysine, lysine-NH2, or absent, or is a linking or spacer group + XE40, wherein XE40 is a lysine, cysteine, general formula 3, or general formula 4
  MOD_RES (39)..(40): Xaa 39 and Xaa 40 is linked by Lj, Lj is a linking group or spacer group
  MOD_RES (40)..(40): methionine, cysteine, general formula 1, general formula 2 or absent
  MOD_RES (124)..(124): cysteine or asparagine
  MOD_RES (156)..(156): cysteine or serine
HXEGTFTSDXSXQXEEEAVXLFIEWLXXXXPXXGXPPPXXRPSGRKSSKMQAFRIWDVNQKTFYLRNNQLVAGYLQGPNVNLEEKIDVVPIEPHALFLGIHGGKMCLSCVKSGDETRLQLEAVXITDLSENRKQDKRFAFIRSDSGPTTSFESAAXPGWFLCTAMEADQPVSLTNMPDEGVMVTKFYFQEDE

SEQ ID NO: 238 - protein, 253 aa, Artificial Sequence
  Description of Artificial Sequence: Synthetic fusion protein
  MOD_RES (2)..(2): glycine, alanine, 2-methylalanine, D-serine, serine, threonine, leucine, isoleucine, valine, aminocyclopropanecarboxylic acid, aminocyclobutanecarboxylic acid, aminocyclopentanecarboxylic acid,
  MOD_RES (2)..(2): aminocyclohexanecarboxylic acid, aminocycloheptanecarboxylic acid, or aminocyclooctanecarboxylic acid
  MOD_RES (10)..(10): leucine, isoleucine, tyrosine, valine, alanine, lysine, cysteine, general formula 1, general formula 2, or pentaglycine
  MOD_RES (12)..(12): lysine, cysteine, arginine, serine, isoleucine, or general formula 1, or general formula 2
  MOD_RES (14)..(14): methionine, leucine, norleucine, isoleucine, alanine, valine, or general formula 1, or general formula 2
  MOD_RES (20)..(20): lysine, glutamine, cysteine, arginine, general formula 1, or general formula 2
  MOD_RES (27)..(27): lysine, cysteine, asparagine, leucine, valine, arginine, general formula 1, or general formula 2
  MOD_RES (28)..(28): asparagine, lysine, cysteine, arginine, alanine, general formula 1, or general formula 2
  MOD_RES (29)..(29): -NH2, glycine, glutamine, threonine, lysine, cysteine, or absent
  MOD_RES (30)..(30): -NH2, glycine, tyrosine, arginine, lysine, cysteine, general formula 1, general formula 2, or absent
  MOD_RES (31)..(39): P31 to Xaa 39 are repeated for 0 or 1 time
  MOD_RES (32)..(32): serine, lysine, cysteine, deletion, general formula 1, or general formula 2
  MOD_RES (33)..(33): serine, lysine, cysteine, general formula 1, general formula 2, or absent
  MOD_RES (35)..(35): alanine, lysine, cysteine, general formula 1, general formula 2, or absent
  MOD_RES (39)..(39): serine, serine-NH2, cysteine, cysteine-NH2, lysine, lysine-NH2, or absent, or is a linking or spacer group + XE40, wherein XE40 is a lysine, cysteine, general formula 3, or general formula 4
  MOD_RES (40)..(69): "GGGGS" is repeated for 0, 1, 2, 3, 4, 5 or 6 times
  MOD_RES (70)..(70): cysteine, lysine, absent, general formula 1, or general formula 2
  MOD_RES (71)..(100): "GGGGS" is repeated for 0, 1, 2, 3, 4, 5 or 6 times
  MOD_RES (101)..(101): methionine, cysteine, general formula 1, general formula 2 or absent
  MOD_RES (185)..(185): cysteine or asparagine
  MOD_RES (217)..(217): cysteine or serine
HXEGTFTSDXSXQXEEEAVXLFIEWLXXXXPXXGXPPPXGGGGSGGGGSGGGGSGGGGSGGGGSGGGGSXGGGGSGGGGSGGGGSGGGGSGGGGSGGGGSXRPSGRKSSKMQAFRIWDVNQKTFYLRNNQLVAGYLQGPNVNLEEKIDVVPIEPHALFLGIHGGKMCLSCVKSGDETRLQLEAVXITDLSENRKQDKRFAFIRSDSGPTTSFESAAXPGWFLCTAMEADQPVSLTNMPDEGVMVTKFYFQEDE

SEQ ID NO: 239 - protein, 253 aa, Artificial Sequence
  Description of Artificial Sequence: Synthetic fusion protein
  MOD_RES (12)..(12): lysine, cysteine, arginine, serine, isoleucine, or general formula 1, or general formula 2
  MOD_RES (27)..(27): lysine, cysteine, asparagine, leucine, valine, arginine, general formula 1, or general formula 2
  MOD_RES (40)..(69): "GGGGS" is repeated for 0, 1, 2, 3, 4, 5 or 6 times
  MOD_RES (70)..(70): cysteine, lysine, absent, general formula 1, or general formula 2
  MOD_RES (71)..(100): "GGGGS" is repeated for 0, 1, 2, 3, 4, 5 or 6 times
  MOD_RES (101)..(101): methionine, cysteine, general formula 1, general formula 2 or absent
  MOD_RES (217)..(217): cysteine or serine
HGEGTFTSDLSXQMEEEAVRLFIEWLXNGGPSSGAPPPSGGGGSGGGGSGGGGSGGGGSGGGGSGGGGSXGGGGSGGGGSGGGGSGGGGSGGGGSGGGGSXRPSGRKSSKMQAFRIWDVNQKTFYLRNNQLVAGYLQGPNVNLEEKIDVVPIEPHALFLGIHGGKMCLSCVKSGDETRLQLEAVNITDLSENRKQDKRFAFIRSDSGPTTSFESAAXPGWFLCTAMEADQPVSLTNMPDEGVMVTKFYFQEDE

SEQ ID NO: 240 - protein, 222 aa, Artificial Sequence
  Description of Artificial Sequence: Synthetic fusion protein
  MOD_RES (12)..(12): lysine, cysteine, arginine, serine, isoleucine, or general formula 1, or general formula 2
  MOD_RES (27)..(27): lysine, cysteine, asparagine, leucine, valine, arginine, general formula 1, or general formula 2
  MOD_RES (39)..(39): serine, serine-NH2, cysteine, cysteine-NH2, lysine, lysine-NH2, or absent, or is a linking or spacer group + XE40, wherein XE40 is a lysine, cysteine, general formula 3, or general formula 4
  MOD_RES (40)..(69): "GGGGS" is repeated for 0, 1, 2, 3, 4, 5 or 6 times
  MOD_RES (70)..(70): methionine, cysteine, general formula 1, general formula 2 or absent
  MOD_RES (186)..(186): cysteine or serine
HGEGTFTSDLSXQMEEEAVRLFIEWLXNGGPSSGAPPPXGGGGSGGGGSGGGGSGGGGSGGGGSGGGGSXRPSGRKSSKMQAFRIWDVNQKTFYLRNNQLVAGYLQGPNVNLEEKIDVVPIEPHALFLGIHGGKMCLSCVKSGDETRLQLEAVNITDLSENRKQDKRFAFIRSDSGPTTSFESAAXPGWFLCTAMEADQPVSLTNMPDEGVMVTKFYFQEDE

SEQ ID NO: 241 - protein, 222 aa, Artificial Sequence
  Description of Artificial Sequence: Synthetic fusion protein
  MOD_RES (40)..(69): "GGGGS" is repeated for 0, 1, 2, 3, 4, 5 or 6 times
  MOD_RES (70)..(70): methionine, cysteine, general formula 1, general formula 2 or absent
  MOD_RES (186)..(186): S-OL, S is the sulphur atom on the side chain of a cysteine residue
HGEGTFTSDLSKQMEEEAVRLFIEWLKNGGPSSGAPPPSGGGGSGGGGSGGGGSGGGGSGGGGSGGGGSXRPSGRKSSKMQAFRIWDVNQKTFYLRNNQLVAGYLQGPNVNLEEKIDVVPIEPHALFLGIHGGKMCLSCVKSGDETRLQLEAVNITDLSENRKQDKRFAFIRSDSGPTTSFESAACPGWFLCTAMEADQPVSLTNMPDEGVMVTKFYFQEDE

SEQ ID NO: 242 - protein, 222 aa, Artificial Sequence
  Description of Artificial Sequence: Synthetic fusion protein
  MOD_RES (40)..(69): "GGGGS" is repeated for 0, 1, 2, 3, 4, 5 or 6 times
  MOD_RES (70)..(70): methionine, cysteine, general formula 1, general formula 2 or absent
  MOD_RES (154)..(154): S-OL, S is the sulphur atom on the side chain of a cysteine residue
HGEGTFTSDLSKQMEEEAVRLFIEWLKNGGPSSGAPPPSGGGGSGGGGSGGGGSGGGGSGGGGSGGGGSXRPSGRKSSKMQAFRIWDVNQKTFYLRNNQLVAGYLQGPNVNLEEKIDVVPIEPHALFLGIHGGKMCLSCVKSGDETRLQLEAVCITDLSENRKQDKRFAFIRSDSGPTTSFESAASPGWFLCTAMEADQPVSLTNMPDEGVMVTKFYFQEDE

SEQ ID NO: 243 - protein, 184 aa, Artificial Sequence
  Description of Artificial Sequence: Synthetic fusion protein
  MOD_RES (1)..(1): histidine, D-histidine, deamino-histidine, Beta-hydroxyl-histidine, homohistidine, alpha-fluoromethyl- histidine, alpha-methyl-histidine, N-methyl-histidine, Nalpha-acetyl-histidine, alpha-methyl-histidine, 2-pyridinyl
  MOD_RES (1)..(1): -alanine, 3-pyridinyl-alanine, 4-pyridinyl-alanine, imidazopropionyl
  MOD_RES (2)..(2): 2-methylalanine (Aib), glycine, D-serine, serine, threonine, leucine, isoleucine, alanine, valine, aminocyclopropane- carboxylic acid, aminocyclobutanecarboxylic acid, aminocyclopentanecarboxylic acid, aminocyclohexane-
  MOD_RES (2)..(2): carboxylic acid, aminocycloheptanecarboxylic acid, or aminocyclooctanecarboxylic acid
  MOD_RES (3)..(3): glutamic acid, aspartic acid, or glutamine
  MOD_RES (5)..(5): threonine, aspartic acid, glutamic acid, arginine, alanine, lysine, or histidine
  MOD_RES (6)..(6): phenylalanine, tyrosine, tryptophan, or histidine
  MOD_RES (10)..(10): valine, tyrosine, phenylalanine, tryptophan, histidine, leucine, isoleucine, serine, threonine, aspartic acid, glutamic acid, alanine, lysine, arginine, cysteine, general formula 1, or general formula 2
  MOD_RES (12)..(12): serine, isoleucine, lysine, arginine, cysteine, general formula 1, or general formula 2
  MOD_RES (16)..(16): glycine, serine, histidine, glutamic acid, aspartic acid, glutamine, asparagine, lysine, arginine, homoglutamic acid, cysteine, homocysteine, or cysteic acid
  MOD_RES (17)..(17): glutamine, arginine, isoleucine, glutamic acid, aspartic acid, histidine, lysine, cysteine, general formula 1, or general formula 2
  MOD_RES (18)..(18): alanine, arginine, histidine, glutamic acid, or lysine
  MOD_RES (20)..(20): lysine, arginine, aspartic acid, glutamic acid, glutamine, histidine, 2-methylalanine, cysteine, general formula 1, or general formula 2
  MOD_RES (21)..(21): aspartic acid, glutamic acid, leucine, alanine, lysine, cysteine, general formula 1, or general formula 2
  MOD_RES (24)..(24): alanine, glutamine, asparagine, glutamic acid, aspartic acid, serine, or histidine
  MOD_RES (25)..(25): alanine, tryptophan, phenylalanine, tyrosine, cysteine, lysine, general formula 1, or general formula 2
  MOD_RES (27)..(27): valine, leucine, lysine, arginine, alanine, glycine, cysteine, general formula 1, or general formula 2
  MOD_RES (28)..(28): lysine, arginine, aspartic acid, glutamic acid, alanine, asparagine, cysteine, general formula 1, or general formula 2
  MOD_RES (29)..(29): glycine, glutamine, threonine, serine, lysine, arginine, cysteine, general formula 1, or general formula 2
  MOD_RES (30)..(30): arginine, lysine, glycine, histidine, cysteine, general formula 1, or general formula 2
  MOD_RES (31)..(31): -NH2, glycine, threonine, serine, aspartic acid, glutamic acid, tryptophan, tyrosine, phenylalanine, histidine, arginine, lysine, cysteine, a linking or spacer group, general formula 3, general formula 4 or a linking or spacer
  MOD_RES (31)..(31): group +XG32, in which
  MOD_RES (31)..(32): Xaa 31 and Xaa 32 are linked by Lj, Lj is a linking group or spacer group
  MOD_RES (32)..(32): methionine, cysteine, general formula 1, general formula 2 or absent
  MOD_RES (98)..(98): cysteine or serine
  MOD_RES (101)..(101): cysteine or serine
  MOD_RES (116)..(116): cysteine or asparagine
  MOD_RES (148)..(148): cysteine or serine
  MOD_RES (154)..(154): cysteine or serine
XXXGXXTSDXSXYLEXXXAXXFIXXLXXXXXXRPSGRKSSKMQAFRIWDVNQKTFYLRNNQLVAGYLQGPNVNLEEKIDVVPIEPHALFLGIHGGKMXLSXVKSGDETRLQLEAVXITDLSENRKQDKRFAFIRSDSGPTTSFESAAXPGWFLXTAMEADQPVSLTNMPDEGVMVTKFYFQEDE

SEQ ID NO: 244 - protein, 184 aa, Artificial Sequence
  Description of Artificial Sequence: Synthetic fusion protein
  MOD_RES (2)..(2): 2-methylalanine (Aib), glycine, D-serine, serine, threonine, leucine, isoleucine, alanine, valine, aminocyclopropane- carboxylic acid, aminocyclobutanecarboxylic acid, aminocyclopentanecarboxylic acid, aminocyclohexane-
  MOD_RES (2)..(2): carboxylic acid, aminocycloheptanecarboxylic acid, or aminocyclooctanecarboxylic acid
  MOD_RES (10)..(10): valine, tyrosine, phenylalanine, tryptophan, histidine, leucine, isoleucine, serine, threonine, aspartic acid, glutamic acid, alanine, lysine, arginine, cysteine, general formula 1, or general formula 2
  MOD_RES (12)..(12): serine, isoleucine, lysine, arginine, cysteine, general formula 1, or general formula 2
  MOD_RES (16)..(16): glycine, serine, histidine, glutamic acid, aspartic acid, glutamine, asparagine, lysine, arginine, homoglutamic acid, cysteine, homocysteine, or cysteic acid
  MOD_RES (20)..(20): lysine, arginine, aspartic acid, glutamic acid, glutamine, histidine, 2-methylalanine, cysteine, general formula 1, or general formula 2
  MOD_RES (28)..(28): lysine, arginine, aspartic acid, glutamic acid, alanine, asparagine, cysteine, general formula 1, or general formula 2
  MOD_RES (31)..(31): -NH2, glycine, threonine, serine, aspartic acid, glutamic acid, tryptophan, tyrosine, phenylalanine, histidine, arginine, lysine, cysteine, a linking or spacer group, general formula 3, general formula 4 or a linking or
  MOD_RES (31)..(31): -spacer group +XG32, in which XG32 is a lysine, cysteine, general formula 3, general formula 4 or absent
  MOD_RES (31)..(32): Xaa 31 and Xaa 32 are linked by Lj, Lj is a linking group or spacer group
  MOD_RES (32)..(32): methionine, cysteine, general formula 1, general formula 2 or absent
  MOD_RES (116)..(116): cysteine or asparagine
  MOD_RES (148)..(148): cysteine or serine
HXEGTFTSDXSXYLEXQAAXEFIAWLVXGRXXRPSGRKSSKMQAFRIWDVNQKTFYLRNNQLVAGYLQGPNVNLEEKIDVVPIEPHALFLGIHGGKMCLSCVKSGDETRLQLEAVXITDLSENRKQDKRFAFIRSDSGPTTSFESAAXPGWFLCTAMEADQPVSLTNMPDEGVMVTKFYFQEDE

SEQ ID NO: 245 - protein, 245 aa, Artificial Sequence
  Description of Artificial Sequence: Synthetic fusion protein
  MOD_RES (2)..(2): 2-methylalanine (Aib), glycine, D-serine, serine, threonine, leucine, isoleucine, alanine, valine, aminocyclopropane- carboxylic acid, aminocyclobutanecarboxylic acid, aminocyclopentanecarboxylic acid, aminocyclohexane-
  MOD_RES (2)..(2): carboxylic acid, aminocycloheptanecarboxylic acid, or aminocyclooctanecarboxylic acid
  MOD_RES (10)..(10): valine, tyrosine, phenylalanine, tryptophan, histidine, leucine, isoleucine, serine, threonine, aspartic acid, glutamic acid, alanine, lysine, arginine, cysteine, general formula 1, or general formula 2
  MOD_RES (12)..(12): serine, isoleucine, lysine, arginine, cysteine, general formula 1, or general formula 2
  MOD_RES (16)..(16): glycine, serine, histidine, glutamic acid, aspartic acid, glutamine, asparagine, lysine, arginine, homoglutamic acid, cysteine, homocysteine, or cysteic acid
  MOD_RES (20)..(20): lysine, arginine, aspartic acid, glutamic acid, glutamine, histidine, 2-methylalanine, cysteine, general formula 1, or general formula 2
  MOD_RES (28)..(28): lysine, arginine, aspartic acid, glutamic acid, alanine, asparagine, cysteine, general formula 1, or general formula 2
  MOD_RES (31)..(31): -NH2, glycine, threonine, serine, aspartic acid, glutamic acid, tryptophan, tyrosine, phenylalanine, histidine, arginine, lysine, cysteine, a linking or spacer group, general formula 3, general formula 4 or a linking or
  MOD_RES (31)..(31): spacer group +XG32
  MOD_RES (32)..(61): "GGGGS" is repeated for 0, 1, 2, 3, 4, 5 or 6 times
  MOD_RES (62)..(62): cysteine, lysine, absent, general formula 1, or general formula 2
  MOD_RES (63)..(92): "GGGGS" is repeated for 0, 1, 2, 3, 4, 5 or 6 times
  MOD_RES (93)..(93): Xaa can be any naturally occurring amino acid
  MOD_RES (177)..(177): cysteine or asparagine
  MOD_RES (209)..(209): cysteine or serine
HXEGTFTSDXSXYLEXQAAXEFIAWLVXGRXGGGGSGGGGSGGGGSGGGGSGGGGSGGGGSXGGGGSGGGGSGGGGSGGGGSGGGGSGGGGSXRPSGRKSSKMQAFRIWDVNQKTFYLRNNQLVAGYLQGPNVNLEEKIDVVPIEPHALFLGIHGGKMCLSCVKSGDETRLQLEAVXITDLSENRKQDKRFAFIRSDSGPTTSFESAAXPGWFLCTAMEADQPVSLTNMPDEGVMVTKFYFQEDE

SEQ ID NO: 246 - protein, 245 aa, Artificial Sequence
  Description of Artificial Sequence: Synthetic fusion protein
  MOD_RES (2)..(2): 2-methylalanine (Aib), glycine, D-serine, serine, threonine, leucine, isoleucine, alanine, valine, aminocyclopropane- carboxylic acid, aminocyclobutanecarboxylic acid, aminocyclopentanecarboxylic acid, aminocyclohexanecarboxylic
  MOD_RES (2)..(2): acid, aminocycloheptanecarboxylic acid, or aminocyclooctanecarboxylic acid
  MOD_RES (10)..(10): valine, tyrosine, phenylalanine, tryptophan, histidine, leucine, isoleucine, serine, threonine, aspartic acid, glutamic acid, alanine, lysine, arginine, cysteine, general formula 1, or general formula 2
  MOD_RES (16)..(16): glycine, serine, histidine, glutamic acid, aspartic acid, glutamine, asparagine, lysine, arginine, homoglutamic acid, cysteine, homocysteine, or cysteic acid
  MOD_RES (20)..(20): lysine, arginine, aspartic acid, glutamic acid, glutamine, histidine, 2-methylalanine, cysteine, general formula 1, or general formula 2
  MOD_RES (28)..(28): lysine, arginine, aspartic acid, glutamic acid, alanine, asparagine, cysteine, general formula 1, or general formula 2
  MOD_RES (32)..(61): "GGGGS" is repeated for 0, 1, 2, 3, 4, 5 or 6 times
  MOD_RES (62)..(62): cysteine, lysine, absent, general formula 1, or general formula 2
  MOD_RES (63)..(92): "GGGGS" is repeated for 0, 1, 2, 3, 4, 5 or 6 times
  MOD_RES (93)..(93): methionine, cysteine, general formula 1, general formula 2 or absent
  MOD_RES (209)..(209): cysteine or serine
HXEGTFTSDXSSYLEXQAAXEFIAWLVXGRGGGGGSGGGGSGGGGSGGGGSGGGGSGGGGSXGGGGSGGGGSGGGGSGGGGSGGGGSGGGGSXRPSGRKSSKMQAFRIWDVNQKTFYLRNNQLVAGYLQGPNVNLEEKIDVVPIEPHALFLGIHGGKMCLSCVKSGDETRLQLEAVNITDLSENRKQDKRFAFIRSDSGPTTSFESAAXPGWFLCTAMEADQPVSLTNMPDEGVMVTKFYFQEDE

SEQ ID NO: 247 - protein, 214 aa, Artificial Sequence
  Description of Artificial Sequence: Synthetic fusion protein
  MOD_RES (2)..(2): 2-methylalanine (Aib), glycine, D-serine, serine, threonine, leucine, isoleucine, alanine, valine, aminocyclopropane- carboxylic acid, aminocyclobutanecarboxylic acid, aminocyclopentanecarboxylic acid, aminocyclohexane-
  MOD_RES (2)..(2): carboxylic acid, aminocycloheptanecarboxylic acid, or aminocyclooctanecarboxylic acid
  MOD_RES (10)..(10): valine, tyrosine, phenylalanine, tryptophan, histidine, leucine, isoleucine, serine, threonine, aspartic acid, glutamic acid, alanine, lysine, arginine, cysteine, general formula 1, or general formula 2
  MOD_RES (16)..(16): glycine, serine, histidine, glutamic acid, aspartic acid, glutamine, asparagine, lysine, arginine, homoglutamic acid, cysteine, homocysteine, or cysteic acid
  MOD_RES (20)..(20): lysine, arginine, aspartic acid, glutamic acid, glutamine, histidine, 2-methylalanine, cysteine, general formula 1, or general formula 2
  MOD_RES (28)..(28): lysine, arginine, aspartic acid, glutamic acid, alanine, asparagine, cysteine, general formula 1, or general formula 2
  MOD_RES (31)..(31): -NH2, glycine, threonine, serine, aspartic acid, glutamic acid, tryptophan, tyrosine, phenylalanine, histidine, arginine, lysine, cysteine, a linking or spacer group, general formula 3, general formula 4 or a linking or
  MOD_RES (31)..(31): spacer group +XG32
  MOD_RES (32)..(61): "GGGGS" is repeated for 0, 1, 2, 3, 4, 5 or 6 times
  MOD_RES (62)..(62): methionine, cysteine, general formula 1, general formula 2 or absent
  MOD_RES (178)..(178): cysteine or serine
HXEGTFTSDXSSYLEXQAAXEFIAWLVXGRXGGGGSGGGGSGGGGSGGGGSGGGGSGGGGSXRPSGRKSSKMQAFRIWDVNQKTFYLRNNQLVAGYLQGPNVNLEEKIDVVPIEPHALFLGIHGGKMCLSCVKSGDETRLQLEAVNITDLSENRKQDKRFAFIRSDSGPTTSFESAAXPGWFLCTAMEADQPVSLTNMPDEGVMVTKFYFQEDE

SEQ ID NO: 248 - protein, 214 aa, Artificial Sequence
  Description of Artificial Sequence: Synthetic fusion protein
  MOD_RES (2)..(2): 2-methylalanine (Aib), glycine, D-serine, serine, threonine, leucine, isoleucine, alanine, valine, aminocyclopropane- carboxylic acid, aminocyclobutanecarboxylic acid, aminocyclopentanecarboxylic acid, aminocyclohexane-
  MOD_RES (2)..(2): carboxylic acid, aminocycloheptanecarboxylic acid, or aminocyclooctanecarboxylic acid
  MOD_RES (16)..(16): glycine, serine, histidine, glutamic acid, aspartic acid, glutamine, asparagine, lysine, arginine, homoglutamic acid, cysteine, homocysteine, or cysteic acid
  MOD_RES (32)..(61): "GGGGS" is repeated for 0, 1, 2, 3, 4, 5 or 6 times
  MOD_RES (62)..(62): methionine, cysteine, general formula 1, general formula 2 or absent
  MOD_RES (178)..(178): S-OL, S is the sulphur atom on the side chain of a cysteine residue
HXEGTFTSDVSSYLEXQAAKEFIAWLVKGRGGGGGSGGGGSGGGGSGGGGSGGGGSGGGGSXRPSGRKSSKMQAFRIWDVNQKTFYLRNNQLVAGYLQGPNVNLEEKIDVVPIEPHALFLGIHGGKMCLSCVKSGDETRLQLEAVNITDLSENRKQDKRFAFIRSDSGPTTSFESAACPGWFLCTAMEADQPVSLTNMPDEGVMVTKFYFQEDE

SEQ ID NO: 249 - protein, 214 aa, Artificial Sequence
  Description of Artificial Sequence: Synthetic fusion protein
  MOD_RES (2)..(2): 2-methylalanine (Aib), glycine, D-serine, serine, threonine, leucine, isoleucine, alanine, valine, aminocyclopropane- carboxylic acid, aminocyclobutanecarboxylic acid, aminocyclopentanecarboxylic acid, aminocyclohexane-
  MOD_RES (2)..(2): carboxylic
  MOD_RES (16)..(16): glycine, serine, histidine, glutamic acid, aspartic acid, glutamine, asparagine, lysine, arginine, homoglutamic acid, cysteine, homocysteine, or cysteic acid
  MOD_RES (32)..(61): "GGGGS" is repeated for 0, 1, 2, 3, 4, 5 or 6 times
  MOD_RES (62)..(62): methionine, cysteine, general formula 1, general formula 2 or absent
  MOD_RES (146)..(146): S-OL, S is the sulphur atom on the side chain of a cysteine residue
HXEGTFTSDVSSYLEXQAAKEFIAWLVKGRGGGGGSGGGGSGGGGSGGGGSGGGGSGGGGSXRPSGRKSSKMQAFRIWDVNQKTFYLRNNQLVAGYLQGPNVNLEEKIDVVPIEPHALFLGIHGGKMCLSCVKSGDETRLQLEAVCITDLSENRKQDKRFAFIRSDSGPTTSFESAASPGWFLCTAMEADQPVSLTNMPDEGVMVTKFYFQEDE

SEQ ID NO: 250 - protein, 254 aa, Artificial Sequence
  Description of Artificial Sequence: Synthetic fusion protein
  MOD_RES (2)..(2): 2-methylalanine (Aib), glycine, D-serine, serine, threonine, leucine, isoleucine, alanine, valine, aminocyclopropane- carboxylic acid, aminocyclobutanecarboxylic acid, aminocyclopentanecarboxylic acid, aminocyclohexane-
  MOD_RES (2)..(2): carboxylic
  MOD_RES (10)..(10): valine, tyrosine, phenylalanine, tryptophan, histidine, leucine, isoleucine, serine, threonine, aspartic acid, glutamic acid, alanine, lysine, arginine, cysteine, general formula 1,or general formula 2
  MOD_RES (16)..(16): glycine, serine, histidine, glutamic acid, aspartic acid, glutamine, asparagine, lysine, arginine, homoglutamic acid, cysteine, homocysteine, or cysteic acid
  MOD_RES (20)..(20): lysine, arginine, aspartic acid, glutamic acid, glutamine, histidine, 2-methylalanine, cysteine, general formula 1, or general formula 2
  MOD_RES (28)..(28): lysine, arginine, aspartic acid, glutamic acid, alanine, asparagine, cysteine, general formula 1, or general formula 2
  MOD_RES (40)..(69): "GGGGS" is repeated for 0, 1, 2, 3, 4, 5 or 6 times
  MOD_RES (70)..(70): cysteine, lysine, absent, general formula 1, or general formula 2
  MOD_RES (71)..(100): "GGGGS" is repeated for 0, 1, 2, 3, 4, 5 or 6 times
  MOD_RES (101)..(101): methionine, cysteine, general formula 1, general formula 2 or absent
  MOD_RES (217)..(217): cysteine or serine
HXEGTFTSDXSSYLEXQAAXEFIAWLVXGRPSSGAPPPSGGGGSGGGGSGGGGSGGGGSGGGGSGGGGSXGGGGSGGGGSGGGGSGGGGSGGGGSGGGGSXRPSGRKSSKMQAFRIWDVNQKTFYLRNNQLVAGYLQGPNVNLEEKIDVVPIEPHALFLGIHGGKMCLSCVKSGDETRLQLEAVNITDLSENRKQDKRFAFIRSDSGPTTSFESAAXCPGWFLCTAMEADQPVSLTNMPDEGVMVTKFYFQEDE

SEQ ID NO: 251 - protein, 222 aa, Artificial Sequence
  Description of Artificial Sequence: Synthetic fusion protein
  MOD_RES (2)..(2): 2-methylalanine (Aib), glycine, D-serine, serine, threonine, leucine, isoleucine, alanine, valine, aminocyclopropane- carboxylic acid, aminocyclobutanecarboxylic acid, aminocyclopentanecarboxylic acid, aminocyclohexane-
  MOD_RES (2)..(2): carboxylic
  MOD_RES (10)..(10): valine, tyrosine, phenylalanine, tryptophan, histidine, leucine, isoleucine, serine, threonine, aspartic acid, glutamic acid, alanine, lysine, arginine, cysteine, general formula 1, or general formula 2
  MOD_RES (16)..(16): glycine, serine, histidine, glutamic acid, aspartic acid, glutamine, asparagine, lysine, arginine, homoglutamic acid, cysteine, homocysteine, or cysteic acid
  MOD_RES (20)..(20): lysine, arginine, aspartic acid, glutamic acid, glutamine, histidine, 2-methylalanine, cysteine, general formula 1, or general formula 2
  MOD_RES (28)..(28): lysine, arginine, aspartic acid, glutamic acid, alanine, asparagine, cysteine, general formula 1, or general formula 2
  MOD_RES (39)..(39): Xaa can be any naturally occurring amino acid
  MOD_RES (40)..(69): "GGGGS" is repeated for 0, 1, 2, 3, 4, 5 or 6 times
  MOD_RES (70)..(70): methionine, cysteine, general formula 1, general formula 2 or absent
  MOD_RES (186)..(186): cysteine or serine
HXEGTFTSDXSSYLEXQAAXEFIAWLVXGRPSSGAPPPXGGGGSGGGGSGGGGSGGGGSGGGGSGGGGSXRPSGRKSSKMQAFRIWDVNQKTFYLRNNQLVAGYLQGPNVNLEEKIDVVPIEPHALFLGIHGGKMCLSCVKSGDETRLQLEAVNITDLSENRKQDKRFAFIRSDSGPTTSFESAAXPGWFLCTAMEADQPVSLTNMPDEGVMVTKFYFQEDE

SEQ ID NO: 252 - protein, 222 aa, Artificial Sequence
  Description of Artificial Sequence: Synthetic fusion protein
  MOD_RES (2)..(2): 2-methylalanine (Aib), glycine, D-serine, serine, threonine, leucine, isoleucine, alanine, valine, aminocyclopropane- carboxylic acid, aminocyclobutanecarboxylic acid, aminocyclopentanecarboxylic acid, aminocyclohexane-
  MOD_RES (2)..(2): carboxylic
  MOD_RES (16)..(16): glycine, serine, histidine, glutamic acid, aspartic acid, glutamine, asparagine, lysine, arginine, homoglutamic acid, cysteine, homocysteine, or cysteic acid
  MOD_RES (40)..(69): "GGGGS" is repeated for 0, 1, 2, 3, 4, 5 or 6 times
  MOD_RES (70)..(70): methionine, cysteine, general formula 1, general formula 2 or absent
  MOD_RES (186)..(186): S-OL, S is the sulphur atom on the side chain of a cysteine residue
HXEGTFTSDVSSYLEXQAAKEFIAWLVKGRPSSGAPPPSGGGGSGGGGSGGGGSGGGGSGGGGSGGGGSXRPSGRKSSKMQAFRIWDVNQKTFYLRNNQLVAGYLQGPNVNLEEKIDVVPIEPHALFLGIHGGKMCLSCVKSGDETRLQLEAVNITDLSENRKQDKRFAFIRSDSGPTTSFESAACPGWFLCTAMEADQPVSLTNMPDEGVMVTKFYFQEDE

SEQ ID NO: 253 - protein, 222 aa, Artificial Sequence
  Description of Artificial Sequence: Synthetic fusion protein
  MOD_RES (2)..(2): 2-methylalanine (Aib), glycine, D-serine, serine, threonine, leucine, isoleucine, alanine, valine, aminocyclopropane- carboxylic acid, aminocyclobutanecarboxylic acid, aminocyclopentanecarboxylic acid, aminocyclohexane-
  MOD_RES (2)..(2): carboxylic acid, aminocycloheptanecarboxylic acid, or aminocyclooctanecarboxylic acid
  MOD_RES (16)..(16): glycine, serine, histidine, glutamic acid, aspartic acid, glutamine, asparagine, lysine, arginine, homoglutamic acid, cysteine, homocysteine, or cysteic acid
  MOD_RES (40)..(69): "GGGGS" is repeated for 0, 1, 2, 3, 4, 5 or 6 times
  MOD_RES (70)..(70): methionine, cysteine, general formula 1, general formula 2 or absent
  MOD_RES (154)..(154): S-OL, S is the sulphur atom on the side chain of a cysteine residue
HXEGTFTSDVSSYLEXQAAKEFIAWLVKGRPSSGAPPPSGGGGSGGGGSGGGGSGGGGSGGGGSGGGGSXRPSGRKSSKMQAFRIWDVNQKTFYLRNNQLVAGYLQGPNVNLEEKIDVVPIEPHALFLGIHGGKMCLSCVKSGDETRLQLEAVCITDLSENRKQDKRFAFIRSDSGPTTSFESAASPGWFLCTAMEADQPVSLTNMPDEGVMVTKFYFQEDE

SEQ ID NO: 254 - protein, 837 aa, Artificial Sequence
  Description of Artificial Sequence: Synthetic fusion protein
  MOD_RES (40)..(69): "GGGGS" is repeated for 0, 1, 2, 3, 4, 5 or 6 times
  MOD_RES (655)..(684): "GGGGS" is repeated for 0, 1, 2, 3, 4, 5 or 6 times
  MOD_RES (685)..(685): methionine, cysteine, general formula 1, general formula 2 or absent
HGEGTFTSDLSKQMEEEAVRLFIEWLKNGGPSSGAPPPSGGGGSGGGGSGGGGSGGGGSGGGGSGGGGSDAHKSEVAHRFKDLGEENFKALVLIAFAQYLQQCPFEDHVKLVNEVTEFAKTCVADESAENCDKSLHTLFGDKLCTVATLRETYGEMADCCAKQEPERNECFLQHKDDNPNLPRLVRPEVDVMCTAFHDNEETFLKKYLYEIARRHPYFYAPELLFFAKRYKAAFTECCQAADKAACLLPKLDELRDEGKASSAKQRLKCASLQKFGERAFKAWAVARLSQRFPKAEFAEVSKLVTDLTKVHTECCHGDLLECADDRADLAKYICENQDSISSKLKECCEKPLLEKSHCIAEVENDEMPADLPSLAADFVESKDVCKNYAEAKDVFLGMFLYEYARRHPDYSVVLLLRLAKTYETTLEKCCAAADPHECYAKVFDEFKPLVEEPQNLIKQNCELFEQLGEYKFQNALLVRYTKKVPQVSTPTLVEVSRNLGKVGSKCCKHPEAKRMPCAEDYLSVVLNQLCVLHEKTPVSDRVTKCCTESLVNRRPCFSALEVDETYVPKEFNAETFTFHADICTLSEKERQIKKQTALVELVKHKPKATKEQLKAVMDDFAAFVEKCCKADDKETCFAEEGKKLVAASQAALGLGGGGSGGGGSGGGGSGGGGSGGGGSGGGGSXRPSGRKSSKMQAFRIWDVNQKTFYLRNNQLVAGYLQGPNVNLEEKIDVVPIEPHALFLGIHGGKMCLSCVKSGDETRLQLEAVNITDLSENRKQDKRFAFIRSDSGPTTSFESAACPGWFLCTAMEADQPVSLTNMPDEGVMVTKFYFQEDE

SEQ ID NO: 255 - protein, 837 aa, Artificial Sequence
  Description of Artificial Sequence: Synthetic fusion protein
  MOD_RES (40)..(69): "GGGGS" is repeated for 0, 1, 2, 3, 4, 5 or 6 times
  MOD_RES (70)..(70): methionine, cysteine, general formula 1, general formula 2 or absent
  MOD_RES (223)..(252): "GGGGS" is repeated for 0, 1, 2, 3, 4, 5 or 6 times
HGEGTFTSDLSKQMEEEAVRLFIEWLKNGGPSSGAPPPSGGGGSGGGGSGGGGSGGGGSGGGGSGGGGSXRPSGRKSSKMQAFRIWDVNQKTFYLRNNQLVAGYLQGPNVNLEEKIDVVPIEPHALFLGIHGGKMCLSCVKSGDETRLQLEAVNITDLSENRKQDKRFAFIRSDSGPTTSFESAACPGWFLCTAMEADQPVSLTNMPDEGVMVTKFYFQEDEGGGGSGGGGSGGGGSGGGGSGGGGSGGGGSDAHKSEVAHRFKDLGEENFKALVLIAFAQYLQQCPFEDHVKLVNEVTEFAKTCVADESAENCDKSLHTLFGDKLCTVATLRETYGEMADCCAKQEPERNECFLQHKDDNPNLPRLVRPEVDVMCTAFHDNEETFLKKYLYEIARRHPYFYAPELLFFAKRYKAAFTECCQAADKAACLLPKLDELRDEGKASSAKQRLKCASLQKFGERAFKAWAVARLSQRFPKAEFAEVSKLVTDLTKVHTECCHGDLLECADDRADLAKYICENQDSISSKLKECCEKPLLEKSHCIAEVENDEMPADLPSLAADFVESKDVCKNYAEAKDVFLGMFLYEYARRHPDYSVVLLLRLAKTYETTLEKCCAAADPHECYAKVFDEFKPLVEEPQNLIKQNCELFEQLGEYKFQNALLVRYTKKVPQVSTPTLVEVSRNLGKVGSKCCKHPEAKRMPCAEDYLSVVLNQLCVLHEKTPVSDRVTKCCTESLVNRRPCFSALEVDETYVPKEFNAETFTFHADICTLSEKERQIKKQTALVELVKHKPKATKEQLKAVMDDFAAFVEKCCKADDKETCFAEEGKKLVAASQAALGL

SEQ ID NO: 256 - protein, 829 aa, Artificial Sequence
  Description of Artificial Sequence: Synthetic fusion protein
  MOD_RES (2)..(2): 2-methylalanine (Aib), glycine, D-serine, serine, threonine, leucine, isoleucine, alanine, valine, aminocyclopropane- carboxylic acid, aminocyclobutanecarboxylic acid, aminocyclopentanecarboxylic acid, aminocyclohexane-
  MOD_RES (2)..(2): carboxylic acid, aminocycloheptanecarboxylic acid, or aminocyclooctanecarboxylic acid
  MOD_RES (16)..(16): glycine, serine, histidine, glutamic acid, aspartic acid, glutamine, asparagine, lysine, arginine, homoglutamic acid, cysteine, homocysteine, or cysteic acid
  MOD_RES (32)..(61): "GGGGS" is repeated for 0, 1, 2, 3, 4, 5 or 6 times
  MOD_RES (647)..(676): "GGGGS" is repeated for 0, 1, 2, 3, 4, 5 or 6 times
  MOD_RES (677)..(677): methionine, cysteine, general formula 1, general formula 2 or absent
HXEGTFTSDVSSYLEXQAAKEFIAWLVKGRGGGGGSGGGGSGGGGSGGGGSGGGGSGGGGSDAHKSEVAHRFKDLGEENFKALVLIAFAQYLQQCPFEDHVKLVNEVTEFAKTCVADESAENCDKSLHTLFGDKLCTVATLRETYGEMADCCAKQEPERNECFLQHKDDNPNLPRLVRPEVDVMCTAFHDNEETFLKKYLYEIARRHPYFYAPELLFFAKRYKAAFTECCQAADKAACLLPKLDELRDEGKASSAKQRLKCASLQKFGERAFKAWAVARLSQRFPKAEFAEVSKLVTDLTKVHTECCHGDLLECADDRADLAKYICENQDSISSKLKECCEKPLLEKSHCIAEVENDEMPADLPSLAADFVESKDVCKNYAEAKDVFLGMFLYEYARRHPDYSVVLLLRLAKTYETTLEKCCAAADPHECYAKVFDEFKPLVEEPQNLIKQNCELFEQLGEYKFQNALLVRYTKKVPQVSTPTLVEVSRNLGKVGSKCCKHPEAKRMPCAEDYLSVVLNQLCVLHEKTPVSDRVTKCCTESLVNRRPCFSALEVDETYVPKEFNAETFTFHADICTLSEKERQIKKQTALVELVKHKPKATKEQLKAVMDDFAAFVEKCCKADDKETCFAEEGKKLVAASQAALGLGGGGSGGGGSGGGGSGGGGSGGGGSGGGGSXRPSGRKSSKMQAFRIWDVNQKTFYLRNNQLVAGYLQGPNVNLEEKIDVVPIEPHALFLGIHGGKMCLSCVKSGDETRLQLEAVNITDLSENRKQDKRFAFIRSDSGPTTSFESAACPGWFLCTAMEADQPVSLTNMPDEGVMVTKFYFQEDE

SEQ ID NO: 257 - protein, 829 aa, Artificial Sequence
  Description of Artificial Sequence: Synthetic fusion protein
  MOD_RES (2)..(2): 2-methylalanine (Aib), glycine, D-serine, serine, threonine, leucine, isoleucine, alanine, valine, aminocyclopropane- carboxylic acid, aminocyclobutanecarboxylic acid, aminocyclopentanecarboxylic acid, aminocyclohexane-
  MOD_RES (2)..(2): carboxylic acid, aminocycloheptanecarboxylic acid, or aminocyclooctanecarboxylic acid
  MOD_RES (16)..(16): glycine, serine, histidine, glutamic acid, aspartic acid, glutamine, asparagine, lysine, arginine, homoglutamic acid, cysteine, homocysteine, or cysteic acid
  MOD_RES (32)..(61): "GGGGS" is repeated for 0, 1, 2, 3, 4, 5 or 6 times
  MOD_RES (62)..(62): methionine, cysteine, general formula 1, general formula 2 or absent
  MOD_RES (215)..(244): "GGGGS" is repeated for 0, 1, 2, 3, 4, 5 or 6 times
HXEGTFTSDVSSYLEXQAAKEFIAWLVKGRGGGGGSGGGGSGGGGSGGGGSGGGGSGGGGSXRPSGRKSSKMQAFRIWDVNQKTFYLRNNQLVAGYLQGPNVNLEEKIDVVPIEPHALFLGIHGGKMCLSCVKSGDETRLQLEAVNITDLSENRKQDKRFAFIRSDSGPTTSFESAACPGWFLCTAMEADQPVSLTNMPDEGVMVTKFYFQEDEGGGGSGGGGSGGGGSGGGGSGGGGSGGGGSDAHKSEVAHRFKDLGEENFKALVLIAFAQYLQQCPFEDHVKLVNEVTEFAKTCVADESAENCDKSLHTLFGDKLCTVATLRETYGEMADCCAKQEPERNECFLQHKDDNPNLPRLVRPEVDVMCTAFHDNEETFLKKYLYEIARRHPYFYAPELLFFAKRYKAAFTECCQAADKAACLLPKLDELRDEGKASSAKQRLKCASLQKFGERAFKAWAVARLSQRFPKAEFAEVSKLVTDLTKVHTECCHGDLLECADDRADLAKYICENQDSISSKLKECCEKPLLEKSHCIAEVENDEMPADLPSLAADFVESKDVCKNYAEAKDVFLGMFLYEYARRHPDYSVVLLLRLAKTYETTLEKCCAAADPHECYAKVFDEFKPLVEEPQNLIKQNCELFEQLGEYKFQNALLVRYTKKVPQVSTPTLVEVSRNLGKVGSKCCKHPEAKRMPCAEDYLSVVLNQLCVLHEKTPVSDRVTKCCTESLVNRRPCFSALEVDETYVPKEFNAETFTFHADICTLSEKERQIKKQTALVELVKHKPKATKEQLKAVMDDFAAFVEKCCKADDKETCFAEEGKKLVAASQAALGL

SEQ ID NO: 258 - protein, 857 aa, Artificial Sequence
  Description of Artificial Sequence: Synthetic fusion protein
  MOD_RES (2)..(2): 2-methylalanine (Aib), glycine, D-serine, serine, threonine, leucine, isoleucine, alanine, valine, aminocyclopropane- carboxylic acid, aminocyclobutanecarboxylic acid, aminocyclopentanecarboxylic acid, aminocyclohexane-
  MOD_RES (2)..(2): carboxylic acid, aminocycloheptanecarboxylic acid, or aminocyclooctanecarboxylic acid
  MOD_RES (16)..(16): glycine, serine, histidine, glutamic acid, aspartic acid, glutamine, asparagine, lysine, arginine, homoglutamic acid, cysteine, homocysteine, or cysteic acid
  MOD_RES (32)..(32): 2-methylalanine (Aib), glycine, D-serine, serine, threonine, leucine, isoleucine, alanine, valine, aminocyclopropane- carboxylic acid, aminocyclobutanecarboxylic acid, aminocyclopentanecarboxylic acid, aminocyclohexane-
  MOD_RES (32)..(32): carboxylic
  MOD_RES (46)..(46): glycine, serine, histidine, glutamic acid, aspartic acid, glutamine, asparagine, lysine, arginine, homoglutamic acid, cysteine, homocysteine, or cysteic acid
  MOD_RES (61)..(90): "GGGGS" is repeated for 0, 1, 2, 3, 4, 5 or 6 times
  MOD_RES (243)..(272): "GGGGS" is repeated for 0, 1, 2, 3, 4, 5 or 6 times
HXEGTFTSDVSSYLEXQAAKEFIAWLVKGRHXEGTFTSDVSSYLEXQAAKEFIAWLVKGRGGGGSGGGGSGGGGSGGGGSGGGGSGGGGSRPSGRKSSKMQAFRIWDVNQKTFYLRNNQLVAGYLQGPNVNLEEKIDVVPIEPHALFLGIHGGKMCLSCVKSGDETRLQLEAVNITDLSENRKQDKRFAFIRSDSGPTTSFESAACPGWFLCTAMEADQPVSLTNMPDEGVMVTKFYFQEDEGGGGSGGGGSGGGGSGGGGSGGGGSGGGGSDAHKSEVAHRFKDLGEENFKALVLIAFAQYLQQCPFEDHVKLVNEVTEFAKTCVADESAENCDKSLHTLFGDKLCTVATLRETYGEMADCCAKQEPERNECFLQHKDDNPNLPRLVRPEVDVMCTAFHDNEETFLKKYLYEIARRHPYFYAPELLFFAKRYKAAFTECCQAADKAACLLPKLDELRDEGKASSAKQRLKCASLQKFGERAFKAWAVARLSQRFPKAEFAEVSKLVTDLTKVHTECCHGDLLECADDRADLAKYICENQDSISSKLKECCEKPLLEKSHCIAEVENDEMPADLPSLAADFVESKDVCKNYAEAKDVFLGMFLYEYARRHPDYSVVLLLRLAKTYETTLEKCCAAADPHECYAKVFDEFKPLVEEPQNLIKQNCELFEQLGEYKFQNALLVRYTKKVPQVSTPTLVEVSRNLGKVGSKCCKHPEAKRMPCAEDYLSVVLNQLCVLHEKTPVSDRVTKCCTESLVNRRPCFSALEVDETYVPKEFNAETFTFHADICTLSEKERQIKKQTALVELVKHKPKATKEQLKAVMDDFAAFVEKCCKADDKETCFAEEGKKLVAASQAALGL

SEQ ID NO: 259 - protein, 857 aa, Artificial Sequence
  Description of Artificial Sequence: Synthetic fusion protein
  MOD_RES (2)..(2): 2-methylalanine (Aib), glycine, D-serine, serine, threonine, leucine, isoleucine, alanine, valine, aminocyclopropane- carboxylic acid, aminocyclobutanecarboxylic acid, aminocyclopentanecarboxylic acid, aminocyclohexane-
  MOD_RES (2)..(2): carboxylic acid, aminocycloheptanecarboxylic acid, or aminocyclooctanecarboxylic acid
  MOD_RES (16)..(16): glycine, serine, histidine, glutamic acid, aspartic acid, glutamine, asparagine, lysine, arginine, homoglutamic acid, cysteine, homocysteine, or cysteic acid
  MOD_RES (32)..(32): 2-methylalanine (Aib), glycine, D-serine, serine, threonine, leucine, isoleucine, alanine, valine, aminocyclopropane- carboxylic acid, aminocyclobutanecarboxylic acid, aminocyclopentanecarboxylic acid, aminocyclohexane-
  MOD_RES (32)..(32): carboxylic
  MOD_RES (46)..(46): glycine, serine, histidine, glutamic acid, aspartic acid, glutamine, asparagine, lysine, arginine, homoglutamic acid, cysteine, homocysteine, or cysteic acid
  MOD_RES (61)..(90): "GGGGS" is repeated for 0, 1, 2, 3, 4, 5 or 6 times
  MOD_RES (676)..(705): "GGGGS" is repeated for 0, 1, 2, 3, 4, 5 or 6 times
HXEGTFTSDVSSYLEXQAAKEFIAWLVKGRHXEGTFTSDVSSYLEXQAAKEFIAWLVKGRGGGGSGGGGSGGGGSGGGGSGGGGSGGGGSDAHKSEVAHRFKDLGEENFKALVLIAFAQYLQQCPFEDHVKLVNEVTEFAKTCVADESAENCDKSLHTLFGDKLCTVATLRETYGEMADCCAKQEPERNECFLQHKDDNPNLPRLVRPEVDVMCTAFHDNEETFLKKYLYEIARRHPYFYAPELLFFAKRYKAAFTECCQAADKAACLLPKLDELRDEGKASSAKQRLKCASLQKFGERAFKAWAVARLSQRFPKAEFAEVSKLVTDLTKVHTECCHGDLLECADDRADLAKYICENQDSISSKLKECCEKPLLEKSHCIAEVENDEMPADLPSLAADFVESKDVCKNYAEAKDVFLGMFLYEYARRHPDYSVVLLLRLAKTYETTLEKCCAAADPHECYAKVFDEFKPLVEEPQNLIKQNCELFEQLGEYKFQNALLVRYTKKVPQVSTPTLVEVSRNLGKVGSKCCKHPEAKRMPCAEDYLSVVLNQLCVLHEKTPVSDRVTKCCTESLVNRRPCFSALEVDETYVPKEFNAETFTFHADICTLSEKERQIKKQTALVELVKHKPKATKEQLKAVMDDFAAFVEKCCKADDKETCFAEEGKKLVAASQAALGLGGGGSGGGGSGGGGSGGGGSGGGGSGGGGSRPSGRKSSKMQAFRIWDVNQKTFYLRNNQLVAGYLQGPNVNLEEKIDVVPIEPHALFLGIHGGKMCLSCVKSGDETRLQLEAVNITDLSENRKQDKRFAFIRSDSGPTTSFESAACPGWFLCTAMEADQPVSLTNMPDEGVMVTKFYFQEDE

SEQ ID NO: 260 - protein, 875 aa, Artificial Sequence
  Description of Artificial Sequence: Synthetic fusion protein
  MOD_RES (31)..(39): P31 to S39 are repeated for 0 or 1 time
  MOD_RES (70)..(78): P70 to S78 are repeated for 0 or 1 time
  MOD_RES (79)..(108): "GGGGS" is repeated for 0, 1, 2, 3, 4, 5 or 6 times
  MOD_RES (261)..(290): "GGGGS" is repeated for 0, 1, 2, 3, 4, 5 or 6 times
HGEGTFTSDLSKQMEEEAVRLFIEWLKNGGPSSGAPPPSHGEGTFTSDLSKQMEEEAVRLFIEWLKNGGPSSGAPPPSGGGGSGGGGSGGGGSGGGGSGGGGSGGGGSRPSGRKSSKMQAFRIWDVNQKTFYLRNNQLVAGYLQGPNVNLEEKIDVVPIEPHALFLGIHGGKMCLSCVKSGDETRLQLEAVNITDLSENRKQDKRFAFIRSDSGPTTSFESAACPGWFLCTAMEADQPVSLTNMPDEGVMVTKFYFQEDEGGGGSGGGGSGGGGSGGGGSGGGGSGGGGSDAHKSEVAHRFKDLGEENFKALVLIAFAQYLQQCPFEDHVKLVNEVTEFAKTCVADESAENCDKSLHTLFGDKLCTVATLRETYGEMADCCAKQEPERNECFLQHKDDNPNLPRLVRPEVDVMCTAFHDNEETFLKKYLYEIARRHPYFYAPELLFFAKRYKAAFTECCQAADKAACLLPKLDELRDEGKASSAKQRLKCASLQKFGERAFKAWAVARLSQRFPKAEFAEVSKLVTDLTKVHTECCHGDLLECADDRADLAKYICENQDSISSKLKECCEKPLLEKSHCIAEVENDEMPADLPSLAADFVESKDVCKNYAEAKDVFLGMFLYEYARRHPDYSVVLLLRLAKTYETTLEKCCAAADPHECYAKVFDEFKPLVEEPQNLIKQNCELFEQLGEYKFQNALLVRYTKKVPQVSTPTLVEVSRNLGKVGSKCCKHPEAKRMPCAEDYLSVVLNQLCVLHEKTPVSDRVTKCCTESLVNRRPCFSALEVDETYVPKEFNAETFTFHADICTLSEKERQIKKQTALVELVKHKPKATKEQLKAVMDDFAAFVEKCCKADDKETCFAEEGKKLVAASQAALGL

SEQ ID NO: 261 - protein, 875 aa, Artificial Sequence
  Description of Artificial Sequence: Synthetic fusion protein
  MOD_RES (31)..(39): P31 to S39 are repeated for 0 or 1 time
  MOD_RES (70)..(78): P70 to S78 are repeated for 0 or 1 time
  MOD_RES (79)..(108): "GGGGS" is repeated for 0, 1, 2, 3, 4, 5 or 6 times
  MOD_RES (694)..(723): 694 to S698 are repeated for 0, 1, 2, 3, 4, 5 or 6 times
HGEGTFTSDLSKQMEEEAVRLFIEWLKNGGPSSGAPPPSHGEGTFTSDLSKQMEEEAVRLFIEWLKNGGPSSGAPPPSGGGGSGGGGSGGGGSGGGGSGGGGSGGGGSDAHKSEVAHRFKDLGEENFKALVLIAFAQYLQQCPFEDHVKLVNEVTEFAKTCVADESAENCDKSLHTLFGDKLCTVATLRETYGEMADCCAKQEPERNECFLQHKDDNPNLPRLVRPEVDVMCTAFHDNEETFLKKYLYEIARRHPYFYAPELLFFAKRYKAAFTECCQAADKAACLLPKLDELRDEGKASSAKQRLKCASLQKFGERAFKAWAVARLSQRFPKAEFAEVSKLVTDLTKVHTECCHGDLLECADDRADLAKYICENQDSISSKLKECCEKPLLEKSHCIAEVENDEMPADLPSLAADFVESKDVCKNYAEAKDVFLGMFLYEYARRHPDYSVVLLLRLAKTYETTLEKCCAAADPHECYAKVFDEFKPLVEEPQNLIKQNCELFEQLGEYKFQNALLVRYTKKVPQVSTPTLVEVSRNLGKVGSKCCKHPEAKRMPCAEDYLSVVLNQLCVLHEKTPVSDRVTKCCTESLVNRRPCFSALEVDETYVPKEFNAETFTFHADICTLSEKERQIKKQTALVELVKHKPKATKEQLKAVMDDFAAFVEKCCKADDKETCFAEEGKKLVAASQAALGLGGGGSGGGGSGGGGSGGGGSGGGGSGGGGSRPSGRKSSKMQAFRIWDVNQKTFYLRNNQLVAGYLQGPNVNLEEKIDVVPIEPHALFLGIHGGKMCLSCVKSGDETRLQLEAVNITDLSENRKQDKRFAFIRSDSGPTTSFESAACPGWFLCTAMEADQPVSLTNMPDEGVMVTKFYFQEDE

SEQ ID NO: 262 - protein, 485 aa, Artificial Sequence
  Description of Artificial Sequence: Synthetic fusion protein
  MOD_RES (40)..(69): "GGGGS" is repeated for 0, 1, 2, 3, 4, 5 or 6 times
  MOD_RES (70)..(70): methionine, cysteine, general formula 1, general formula 2 or absent
  MOD_RES (223)..(252): "GGGGS" is repeated for 0, 1, 2, 3, 4, 5 or 6 times
HGEGTFTSDLSKQMEEEAVRLFIEWLKNGGPSSGAPPPSGGGGSGGGGSGGGGSGGGGSGGGGSGGGGSXRPSGRKSSKMQAFRIWDVNQKTFYLRNNQLVAGYLQGPNVNLEEKIDVVPIEPHALFLGIHGGKMCLSCVKSGDETRLQLEAVNITDLSENRKQDKRFAFIRSDSGPTTSFESAACPGWFLCTAMEADQPVSLTNMPDEGVMVTKFYFQEDEGGGGSGGGGSGGGGSGGGGSGGGGSGGGGSAEPKSCDKTHTCPPCPAPELLGGPSVFLFPPKPKDTLMISRTPEVTCVVVDVSHEDPEVKFNWYVDGVEVHNAKTKPREEQYNSTYRVVSVLTVLHQDWLNGKEYKCKVSNKALPAPIEKTISKAKGQPREPQVYTLPPSREEMTKNQVSLTCLVKGFYPSDIAVEWESNGQPENNYKTTPPVLDSDGSFFLYSKLTVDKSRWQQGNVFSCSVMHEALHNHYTQKSLSLSPGK

SEQ ID NO: 263 - protein, 485 aa, Artificial Sequence
  Description of Artificial Sequence: Synthetic fusion protein
  MOD_RES (40)..(69): "GGGGS" is repeated for 0, 1, 2, 3, 4, 5 or 6 times
  MOD_RES (303)..(332): "GGGGS" is repeated for 0, 1, 2, 3, 4, 5 or 6 times
  MOD_RES (333)..(333): methionine, cysteine, general formula 1, general formula 2 or absent
HGEGTFTSDLSKQMEEEAVRLFIEWLKNGGPSSGAPPPSGGGGSGGGGSGGGGSGGGGSGGGGSGGGGSAEPKSCDKTHTCPPCPAPELLGGPSVFLFPPKPKDTLMISRTPEVTCVVVDVSHEDPEVKFNWYVDGVEVHNAKTKPREEQYNSTYRVVSVLTVLHQDWLNGKEYKCKVSNKALPAPIEKTISKAKGQPREPQVYTLPPSREEMTKNQVSLTCLVKGFYPSDIAVEWESNGQPENNYKTTPPVLDSDGSFFLYSKLTVDKSRWQQGNVFSCSVMHEALHNHYTQKSLSLSPGKGGGGSGGGGSGGGGSGGGGSGGGGSGGGGSXRPSGRKSSKMQAFRIWDVNQKTFYLRNNQLVAGYLQGPNVNLEEKIDVVPIEPHALFLGIHGGKMCLSCVKSGDETRLQLEAVNITDLSENRKQDKRFAFIRSDSGPTTSFESAACPGWFLCTAMEADQPVSLTNMPDEGVMVTKFYFQEDE

SEQ ID NO: 264 - protein, 477 aa, Artificial Sequence
  Description of Artificial Sequence: Synthetic fusion protein
  MOD_RES (2)..(2): 2-methylalanine (Aib), glycine, D-serine, serine, threonine, leucine, isoleucine, alanine, valine, aminocyclopropane- carboxylic acid, aminocyclobutanecarboxylic acid, aminocyclopentanecarboxylic acid, aminocyclohexane-
  MOD_RES (2)..(2): carboxylic acid, aminocycloheptanecarboxylic acid, or aminocyclooctanecarboxylic acid
  MOD_RES (16)..(16): glycine, serine, histidine, glutamic acid, aspartic acid, glutamine, asparagine, lysine, arginine, homoglutamic acid, cysteine, homocysteine, or cysteic acid
  MOD_RES (32)..(61): "GGGGS" is repeated for 0, 1, 2, 3, 4, 5 or 6 times
  MOD_RES (62)..(62): methionine, cysteine, general formula 1, general formula 2 or absent
  MOD_RES (215)..(244): "GGGGS" is repeated for 0, 1, 2, 3, 4, 5 or 6 times
HXEGTFTSDVSSYLEXQAAKEFIAWLVKGRGGGGGSGGGGSGGGGSGGGGSGGGGSGGGGSXRPSGRKSSKMQAFRIWDVNQKTFYLRNNQLVAGYLQGPNVNLEEKIDVVPIEPHALFLGIHGGKMCLSCVKSGDETRLQLEAVNITDLSENRKQDKRFAFIRSDSGPTTSFESAACPGWFLCTAMEADQPVSLTNMPDEGVMVTKFYFQEDEGGGGSGGGGSGGGGSGGGGSGGGGSGGGGSAEPKSCDKTHTCPPCPAPELLGGPSVFLFPPKPKDTLMISRTPEVTCVVVDVSHEDPEVKFNWYVDGVEVHNAKTKPREEQYNSTYRVVSVLTVLHQDWLNGKEYKCKVSNKALPAPIEKTISKAKGQPREPQVYTLPPSREEMTKNQVSLTCLVKGFYPSDIAVEWESNGQPENNYKTTPPVLDSDGSFFLYSKLTVDKSRWQQGNVFSCSVMHEALHNHYTQKSLSLSPGK

SEQ ID NO: 265 - protein, 477 aa, Artificial Sequence
  Description of Artificial Sequence: Synthetic fusion protein
  MOD_RES (2)..(2): 2-methylalanine (Aib), glycine, D-serine, serine, threonine, leucine, isoleucine, alanine, valine, aminocyclopropane- carboxylic acid, aminocyclobutanecarboxylic acid, aminocyclopentanecarboxylic acid, aminocyclohexane-
  MOD_RES (2)..(2): carboxylic acid, aminocycloheptanecarboxylic acid, or aminocyclooctanecarboxylic acid
  MOD_RES (16)..(16): glycine, serine, histidine, glutamic acid, aspartic acid, glutamine, asparagine, lysine, arginine, homoglutamic acid, cysteine, homocysteine, or cysteic acid
  MOD_RES (32)..(61): "GGGGS" is repeated for 0, 1, 2, 3, 4, 5 or 6 times
  MOD_RES (295)..(324): "GGGGS" is repeated for 0, 1, 2, 3, 4, 5 or 6 times
  MOD_RES (325)..(325): methionine, cysteine, general formula 1, general formula 2 or absent
HXEGTFTSDVSSYLEXQAAKEFIAWLVKGRGGGGGSGGGGSGGGGSGGGGSGGGGSGGGGSAEPKSCDKTHTCPPCPAPELLGGPSVFLFPPKPKDTLMISRTPEVTCVVVDVSHEDPEVKFNWYVDGVEVHNAKTKPREEQYNSTYRVVSVLTVLHQDWLNGKEYKCKVSNKALPAPIEKTISKAKGQPREPQVYTLPPSREEMTKNQVSLTCLVKGFYPSDIAVEWESNGQPENNYKTTPPVLDSDGSFFLYSKLTVDKSRWQQGNVFSCSVMHEALHNHYTQKSLSLSPGKGGGGSGGGGSGGGGSGGGGSGGGGSGGGGSXRPSGRKSSKMQAFRIWDVNQKTFYLRNNQLVAGYLQGPNVNLEEKIDVVPIEPHALFLGIHGGKMCLSCVKSGDETRLQLEAVNITDLSENRKQDKRFAFIRSDSGPTTSFESAACPGWFLCTAMEADQPVSLTNMPDEGVMVTKFYFQEDE

SEQ ID NO: 266 - protein, 472 aa, Artificial Sequence
  Description of Artificial Sequence: Synthetic fusion protein
  MOD_RES (2)..(2): 2-methylalanine (Aib), glycine, D-serine, serine, threonine, leucine, isoleucine, alanine, valine, aminocyclopropane- carboxylic acid, aminocyclobutanecarboxylic acid, aminocyclopentanecarboxylic acid, aminocyclohexane-
  MOD_RES (2)..(2): or carboxylic acid, aminocycloheptanecarboxylic acid, or aminocyclooctanecarboxylic acid
  MOD_RES (32)..(61): "GGGGS" is repeated for 0, 1, 2, 3, 4, 5 or 6 times
  MOD_RES (177)..(177): cysteine or serine
  MOD_RES (214)..(243): "GGGGS" is repeated for 0, 1, 2, 3, 4, 5 or 6 times
HXEGTFTSDVSSYLEEQAAKEFIAWLVKGGGGGGGSGGGGSGGGGSGGGGSGGGGSGGGGSRPSGRKSSKMQAFRIWDVNQKTFYLRNNQLVAGYLQGPNVNLEEKIDVVPIEPHALFLGIHGGKMCLSCVKSGDETRLQLEAVNITDLSENRKQDKRFAFIRSDSGPTTSFESAAXPGWFLCTAMEADQPVSLTNMPDEGVMVTKFYFQEDEGGGGSGGGGSGGGGSGGGGSGGGGSGGGGSAESKYGPPCPPCPAPEAAGGPSVFLFPPKPKDTLMISRTPEVTCVVVDVSQEDPEVQFNWYVDGVEVHNAKTKPREEQFNSTYRVVSVLTVLHQDWLNGKEYKCKVSNKGLPSSIEKTISKAKGQPREPQVYTLPPSQEEMTKNQVSLTCLVKGFYPSDIAVEWESNGQPENNYKTTPPVLDSDGSFFLYSRLTVDKSRWQEGNVFSCSVMHEALHNHYTQKSLSLSLG

SEQ ID NO: 267 - protein, 480 aa, Artificial Sequence
  Description of Artificial Sequence: Synthetic fusion protein
  MOD_RES (31)..(39): P31 to S39 are repeated for 0 or 1 time
  MOD_RES (40)..(69): "GGGGS" is repeated for 0, 1, 2, 3, 4, 5 or 6 times
  MOD_RES (185)..(185): cysteine or serine
  MOD_RES (222)..(251): "GGGGS" is repeated for 0, 1, 2, 3, 4, 5 or 6 times
HGEGTFTSDLSKQMEEEAVRLFIEWLKNGGPSSGAPPPSGGGGSGGGGSGGGGSGGGGSGGGGSGGGGSRPSGRKSSKMQAFRIWDVNQKTFYLRNNQLVAGYLQGPNVNLEEKIDVVPIEPHALFLGIHGGKMCLSCVKSGDETRLQLEAVNITDLSENRKQDKRFAFIRSDSGPTTSFESAAXPGWFLCTAMEADQPVSLTNMPDEGVMVTKFYFQEDEGGGGSGGGGSGGGGSGGGGSGGGGSGGGGSAESKYGPPCPPCPAPEAAGGPSVFLFPPKPKDTLMISRTPEVTCVVVDVSQEDPEVQFNWYVDGVEVHNAKTKPREEQFNSTYRVVSVLTVLHQDWLNGKEYKCKVSNKGLPSSIEKTISKAKGQPREPQVYTLPPSQEEMTKNQVSLTCLVKGFYPSDIAVEWESNGQPENNYKTTPPVLDSDGSFFLYSRLTVDKSRWQEGNVFSCSVMHEALHNHYTQKSLSLSLG

SEQ ID NO: 268 - protein, 153 aa, Artificial Sequence
  Description of Artificial Sequence: Synthetic fusion protein
  MOD_RES (1)..(1): methionine, cysteine, general formula 1, general formula 2 or absent
  MOD_RES (1)..(1): UL
  MOD_RES (117)..(117): linking group-GLP-1 receptor binding polypeptide
XRPSGRKSSKMQAFRIWDVNQKTFYLRNNQLVAGYLQGPNVNLEEKIDVVPIEPHALFLGIHGGKMCLSCVKSGDETRLQLEAVNITDLSENRKQDKRFAFIRSDSGPTTSFESAACPGWFLCTAMEADQPVSLTNMPDEGVMVTKFYFQEDE

SEQ ID NO: 269 - protein, 153 aa, Artificial Sequence
  Description of Artificial Sequence: Synthetic fusion protein
  MOD_RES (1)..(1): methionine, cysteine, general formula 1, general formula 2 or absent
  MOD_RES (1)..(1): UL
  MOD_RES (85)..(85): linking group-GLP-1 receptor binding polypeptide
XRPSGRKSSKMQAFRIWDVNQKTFYLRNNQLVAGYLQGPNVNLEEKIDVVPIEPHALFLGIHGGKMCLSCVKSGDETRLQLEAVCITDLSENRKQDKRFAFIRSDSGPTTSFESAASPGWFLCTAMEADQPVSLTNMPDEGVMVTKFYFQEDE

SEQ ID NO: 270 - protein, 39 aa, Unknown
  Description of Unknown: GLP-1 receptor binding polypeptide
  MOD_RES (1)..(1): histidine, D-histidine, deamino-histidine, Beta-hydroxyl-histidine, homohistidine, alpha-fluoromethyl- histidine, alpha-methyl-histidine, N-methyl-histidine, Nalpha- acetyl-histidine,alpha-methyl-histidine, 2-pyridinyl-alanine,
  MOD_RES (1)..(1): 3-pyridinyl-alanine, 4-pyridinyl-alanine, imidazopropionyl, arginine, or tyrosine
  MOD_RES (2)..(2): glycine, alanine, 2-methylalanine, D-serine, serine, threonine, leucine, isoleucine, valine, aminocyclopropanecarboxylic acid, aminocyclobutanecarboxylic acid, aminocyclopentanecarboxylic acid,
  MOD_RES (2)..(2): aminocyclohexanecarboxylic acid, aminocycloheptanecarboxylic acid, or aminocyclooctanecarboxylic acid
  MOD_RES (10)..(10): leucine, isoleucine, tyrosine, valine, alanine, lysine, cysteine, general formula 1, general formula 2, or pentaglycine
  MOD_RES (12)..(12): lysine, cysteine, arginine, serine, isoleucine, or general formula 1, or general formula 2
  MOD_RES (14)..(14): methionine, leucine, norleucine, isoleucine, alanine, valine, or general formula 1, or general formula 2
  MOD_RES (20)..(20): lysine, glutamine, cysteine, arginine, general formula 1, or general formula 2
  MOD_RES (27)..(27): lysine, cysteine, asparagine, leucine, valine, arginine, general formula 1, or general formula 2
  MOD_RES (28)..(28): asparagine, lysine, cysteine, arginine, alanine, general formula 1, or general formula 2
  MOD_RES (29)..(29): -NH2, glycine, glutamine, threonine, lysine, cysteine, or absent
  MOD_RES (30)..(30): -NH2, glycine, tyrosine, arginine, lysine, cysteine, general formula 1, general formula 2, or absent
  MOD_RES (31)..(39): P31 to C39 are repeated for 0 or 1 time
  MOD_RES (32)..(32): serine, lysine, cysteine, deletion, general formula 1, or general formula 2
  MOD_RES (33)..(33): serine, lysine, cysteine, general formula 1, general formula 2, or absent
  MOD_RES (35)..(35): alanine, lysine, cysteine, general formula 1, general formula 2, or absent
XXEGTFTSDXSXQXEEEAVXLFIEWLXXXXPXXGXPPPC

SEQ ID NO: 271 - protein, 39 aa, Unknown
  Description of Unknown: GLP-1 receptor binding polypeptide
  MOD_RES (1)..(1): histidine, D-histidine, deamino-histidine, Beta-hydroxyl-histidine, homohistidine, alpha-fluoromethyl- histidine, alpha-methyl-histidine, N-methyl-histidine, Nalpha -acetyl-histidine, alpha-methyl-histidine, 2-pyridinyl-alanine,
  MOD_RES (1)..(1): 3-pyridinyl-alanine, 4-pyridinyl-alanine, imidazopropionyl, arginine, or tyrosine
  MOD_RES (2)..(2): glycine, alanine, 2-methylalanine, D-serine, serine, threonine, leucine, isoleucine, valine, aminocyclopropanecarboxylic acid, aminocyclobutanecarboxylic acid, aminocyclopentanecarboxylic acid,
  MOD_RES (2)..(2): aminocyclohexanecarboxylic acid, aminocycloheptanecarboxylic acid, or aminocyclooctanecarboxylic acid
  MOD_RES (10)..(10): leucine, isoleucine, tyrosine, valine, alanine, lysine, cysteine, general formula 1, general formula 2, or pentaglycine
  MOD_RES (12)..(12): lysine, cysteine, arginine, serine, isoleucine, or general formula 1, or general formula 2
  MOD_RES (14)..(14): methionine, leucine, norleucine, isoleucine, alanine, valine, or general formula 1, or general formula 2
  MOD_RES (20)..(20): lysine, glutamine, cysteine, arginine, general formula 1, or general formula 2
  MOD_RES (27)..(27): lysine, cysteine, asparagine, leucine, valine, arginine, general formula 1, or general formula 2
  MOD_RES (28)..(28): asparagine, lysine, cysteine, arginine, alanine, general formula 1, or general formula 2
  MOD_RES (29)..(29): -NH2, glycine, glutamine, threonine, lysine, cysteine, or absent
  MOD_RES (30)..(30): -NH2, glycine, tyrosine, arginine, lysine, cysteine, general formula 1, general formula 2, or absent
  MOD_RES (31)..(39): P31 to Xaa 39 are repeated for 0 or 1 time
  MOD_RES (32)..(32): serine, lysine, cysteine, deletion, general formula 1, or general formula 2
  MOD_RES (33)..(33): serine, lysine, cysteine, general formula 1, general formula 2, or absent
  MOD_RES (39)..(39): serine, serine-NH2, cysteine, cysteine-NH2, lysine, lysine-NH2, or absent, or is a linking or spacer group + XE40, wherein XE40 is a lysine, cysteine, general formula 3, or general formula 4
XXEGTFTSDXSXQXEEEAVXLFIEWLXXXXPXXGCPPPX

SEQ ID NO: 272 - protein, 39 aa, Unknown
  Description of Unknown: GLP-1 receptor binding polypeptide
  MOD_RES (1)..(1): histidine, D-histidine, deamino-histidine, Beta-hydroxyl-histidine, homohistidine, alpha-fluoromethyl- histidine, alpha-methyl-histidine, N-methyl-histidine, Nalpha-acetyl-histidine, alpha-methyl-histidine, 2-pyridinyl
  MOD_RES (1)..(1): -alanine, 3-pyridinyl-alanine, 4-pyridinyl-alanine, imidazopropionyl, arginine, or tyrosine
  MOD_RES (2)..(2): glycine, alanine, 2-methylalanine, D-serine, serine, threonine, leucine, isoleucine, valine, aminocyclopropanecarboxylic acid, aminocyclobutanecarboxylic acid, aminocyclopentanecarboxylic acid,
  MOD_RES (2)..(2): aminocyclohexanecarboxylic acid, aminocycloheptanecarboxylic acid, or aminocyclooctanecarboxylic acid
  MOD_RES (10)..(10): leucine, isoleucine, tyrosine, valine, alanine, lysine, cysteine, general formula 1, general formula 2, or pentaglycine
  MOD_RES (12)..(12): lysine, cysteine, arginine, serine, isoleucine, or general formula 1, or general formula 2
  MOD_RES (14)..(14): methionine, leucine, norleucine, isoleucine, alanine, valine, or general formula 1, or general formula 2
  MOD_RES (20)..(20): lysine, glutamine, cysteine, arginine, general formula 1, or general formula 2
  MOD_RES (27)..(27): lysine, cysteine, asparagine, leucine, valine, arginine, general formula 1, or general formula 2
  MOD_RES (28)..(28): asparagine, lysine, cysteine, arginine, alanine, general formula 1, or general formula 2
  MOD_RES (29)..(29): -NH2, glycine, glutamine, threonine, lysine, cysteine, or absent
  MOD_RES (30)..(30): -NH2, glycine, tyrosine, arginine, lysine, cysteine, general formula 1, general formula 2, or absent
  MOD_RES (31)..(39): P31 to Xaa39 are repeated for 0 or 1 time
  MOD_RES (32)..(32): serine, lysine, cysteine, deletion, general formula 1, or general formula 2
  MOD_RES (35)..(35): alanine, lysine, cysteine, general formula 1, general formula 2, or absent
  MOD_RES (39)..(39): serine, serine-NH2, cysteine, cysteine-NH2, lysine, lysine-NH2, or absent, or is a linking or spacer group + XE40, wherein XE40 is a lysine, cysteine, general formula 3, or general formula 4
XXEGTFTSDXSXQXEEEAVXLFIEWLXXXXPXCGXPPPX

SEQ ID NO: 273 - protein, 39 aa, Unknown
  Description of Unknown: GLP-1 receptor binding polypeptide
  MOD_RES (1)..(1): histidine, D-histidine, deamino-histidine, Beta-hydroxyl-histidine, homohistidine, alpha-fluoromethyl- histidine, alpha-methyl-histidine, N-methyl-histidine, Nalpha-acetyl-histidine, alpha-methyl-histidine, 2-
  MOD_RES (1)..(1): pyridinyl-alanine, 3-pyridinyl-alanine, 4-pyridinyl-alanine, imidazopropionyl, arginine, or tyrosine
  MOD_RES (2)..(2): glycine, alanine, 2-methylalanine, D-serine, serine, threonine, leucine, isoleucine, valine, aminocyclopropanecarboxylic acid, aminocyclobutanecarboxylic acid, aminocyclopentanecarboxylic acid,
  MOD_RES (2)..(2): aminocyclohexanecarboxylic acid, aminocycloheptanecarboxylic acid, or aminocyclooctanecarboxylic acid
  MOD_RES (10)..(10): leucine, isoleucine, tyrosine, valine, alanine, lysine, cysteine, general formula 1, general formula 2, or pentaglycine
  MOD_RES (12)..(12): lysine, cysteine, arginine, serine, isoleucine, or general formula 1, or general formula 2
  MOD_RES (14)..(14): methionine, leucine, norleucine, isoleucine, alanine, valine, or general formula 1, or general formula 2
  MOD_RES (20)..(20): lysine, glutamine, cysteine, arginine, general formula 1, or general formula 2
  MOD_RES (27)..(27): lysine, cysteine, asparagine, leucine, valine, arginine, general formula 1, or general formula 2
  MOD_RES (28)..(28): asparagine, lysine, cysteine, arginine, alanine, general formula 1, or general formula 2
  MOD_RES (29)..(29): -NH2, glycine, glutamine, threonine, lysine, cysteine, or absent
  MOD_RES (30)..(30): -NH2, glycine, tyrosine, arginine, lysine, cysteine, general formula 1, general formula 2, or absent
  MOD_RES (31)..(39): P31 to Xaa 39 are repeated for 0 or 1 time
  MOD_RES (33)..(33): serine, lysine, cysteine, general formula 1, general formula 2, or absent
  MOD_RES (35)..(35): alanine, lysine, cysteine, general formula 1, general formula 2, or absent
  MOD_RES (39)..(39): serine, serine-NH2, cysteine, cysteine-NH2, lysine, lysine-NH2, or absent, or is a linking or spacer group + XE40, wherein XE40 is a lysine, cysteine, general formula 3, or general formula 4
XXEGTFTSDXSXQXEEEAVXLFIEWLXXXXPCXGXPPPX

SEQ ID NO: 274 - protein, 39 aa, Unknown
  Description of Unknown: GLP-1 receptor binding polypeptide
  MOD_RES (1)..(1): histidine, D-histidine, deamino-histidine, Beta-hydroxyl-histidine, homohistidine, alpha-fluoromethyl- histidine, alpha-methyl-histidine, N-methyl-histidine, Nalpha-acetyl-histidine,
  MOD_RES (1)..(1): alpha-methyl-histidine, 2-pyridinyl-alanine, 3-pyridinyl- alanine, 4-pyridinyl-alanine, imidazopropionyl, arginine, or tyrosine
  MOD_RES (2)..(2): glycine, alanine, 2-methylalanine, D-serine, serine, threonine, leucine, isoleucine, valine, aminocyclopropanecarboxylic acid, aminocyclobutanecarboxylic acid, aminocyclopentanecarboxylic acid,
  MOD_RES (2)..(2): aminocyclohexanecarboxylic acid, aminocycloheptanecarboxylic acid, or aminocyclooctanecarboxylic acid
  MOD_RES (10)..(10): leucine, isoleucine, tyrosine, valine, alanine, lysine, cysteine, general formula 1, general formula 2, or pentaglycine
  MOD_RES (12)..(12): lysine, cysteine, arginine, serine, isoleucine, or general formula 1, or general formula 2
  MOD_RES (14)..(14): methionine, leucine, norleucine, isoleucine, alanine, valine, or general formula 1, or general formula 2
  MOD_RES (20)..(20): lysine, glutamine, cysteine, arginine, general formula 1, or general formula 2
  MOD_RES (27)..(27): lysine, cysteine, asparagine, leucine, valine, arginine, general formula 1, or general formula 2
  MOD_RES (28)..(28): asparagine, lysine, cysteine, arginine, alanine, general formula 1, or general formula 2
  MOD_RES (29)..(29): -NH2, glycine, glutamine, threonine, lysine, cysteine, or absent
  MOD_RES (31)..(39): P31 to Xaa39 are repeated for 0 or 1 time
  MOD_RES (32)..(32): serine, lysine, cysteine, deletion, general formula 1, or general formula 2
  MOD_RES (33)..(33): serine, lysine, cysteine, general formula 1, general formula 2, or absent
  MOD_RES (35)..(35): alanine, lysine, cysteine, general formula 1, general formula 2, or absent
  MOD_RES (39)..(39): serine, serine-NH2, cysteine, cysteine-NH2, lysine, lysine-NH2, or absent, or is a linking or spacer group + XE40, wherein XE40 is a lysine, cysteine, general formula 3, or general formula 4
XXEGTFTSDXSXQXEEEAVXLFIEWLXXXCPXXGXPPPX

SEQ ID NO: 275 - protein, 39 aa, Unknown
  Description of Unknown: GLP-1 receptor binding polypeptide
  MOD_RES (1)..(1): histidine, D-histidine, deamino-histidine, Beta-hydroxyl-histidine, homohistidine, alpha-fluoromethyl- histidine, alpha-methyl-histidine, N-methyl-histidine, Nalpha-acetyl-histidine,
  MOD_RES (1)..(1): alpha-methyl-histidine, 2-pyridinyl-alanine, 3-pyridinyl- alanine, 4-pyridinyl-alanine, imidazopropionyl, arginine, or tyrosine
  MOD_RES (2)..(2): glycine, alanine, 2-methylalanine, D-serine, serine, threonine, leucine, isoleucine, valine, aminocyclopropanecarboxylic acid, aminocyclobutanecarboxylic acid, aminocyclopentanecarboxylic acid,
  MOD_RES (2)..(2): aminocyclohexanecarboxylic acid, aminocycloheptanecarboxylic acid, or aminocyclooctanecarboxylic acid
  MOD_RES (10)..(10): leucine, isoleucine, tyrosine, valine, alanine, lysine, cysteine, general formula 1, general formula 2, or pentaglycine
  MOD_RES (12)..(12): lysine, cysteine, arginine, serine, isoleucine, or general formula 1, or general formula 2
  MOD_RES (14)..(14): methionine, leucine, norleucine, isoleucine, alanine, valine, or general formula 1, or general formula 2
  MOD_RES (20)..(20): lysine, glutamine, cysteine, arginine, general formula 1, or general formula 2
  MOD_RES (27)..(27): lysine, cysteine, asparagine, leucine, valine, arginine, general formula 1, or general formula 2
  MOD_RES (28)..(28): asparagine, lysine, cysteine, arginine, alanine, general formula 1, or general formula 2
  MOD_RES (30)..(30): -NH2, glycine, tyrosine, arginine, lysine, cysteine, general formula 1, general formula 2, or absent
  MOD_RES (31)..(39): P31 to Xaa 39 are repeated for 0 or 1 time
  MOD_RES (32)..(32): serine, lysine, cysteine, deletion, general formula 1, or general formula 2
  MOD_RES (33)..(33): serine, lysine, cysteine, general formula 1, general formula 2, or absent
  MOD_RES (35)..(35): alanine, lysine, cysteine, general formula 1, general formula 2, or absent
  MOD_RES (39)..(39): serine, serine-NH2, cysteine, cysteine-NH2, lysine, lysine-NH2, or absent, or is a linking or spacer group + XE40, wherein XE40 is a lysine, cysteine, general formula 3, or general formula 4
XXEGTFTSDXSXQXEEEAVXLFIEWLXXCXPXXGXPPPX

SEQ ID NO: 276 - protein, 39 aa, Unknown
  Description of Unknown: GLP-1 receptor binding polypeptide
  MOD_RES (1)..(1): histidine, D-histidine, deamino-histidine, Beta-hydroxyl-histidine, homohistidine, alpha-fluoromethyl- histidine, alpha-methyl-histidine, N-methyl-histidine, Nalpha-acetyl-histidine,
  MOD_RES (1)..(1): alpha-methyl-histidine, 2-pyridinyl-alanine, 3-pyridinyl- alanine, 4-pyridinyl-alanine, imidazopropionyl, arginine, or tyrosine
  MOD_RES (2)..(2): glycine, alanine, 2-methylalanine, D-serine, serine, threonine, leucine, isoleucine, valine, aminocyclopropanecarboxylic acid, aminocyclobutanecarboxylic acid, aminocyclopentanecarboxylic acid,
  MOD_RES (2)..(2): aminocyclohexanecarboxylic acid, aminocycloheptanecarboxylic acid, or aminocyclooctanecarboxylic acid
  MOD_RES (10)..(10): leucine, isoleucine, tyrosine, valine, alanine, lysine, cysteine, general formula 1, general formula 2, or pentaglycine
  MOD_RES (12)..(12): lysine, cysteine, arginine, serine, isoleucine, or general formula 1, or general formula 2
  MOD_RES (14)..(14): methionine, leucine, norleucine, isoleucine, alanine, valine, or general formula 1, or general formula 2
  MOD_RES (20)..(20): lysine, glutamine, cysteine, arginine, general formula 1, or general formula 2
  MOD_RES (27)..(27): lysine, cysteine, asparagine, leucine, valine, arginine, general formula 1, or general formula 2
  MOD_RES (29)..(29): -NH2, glycine, glutamine, threonine, lysine, cysteine, or absent
  MOD_RES (30)..(30): -NH2, glycine, tyrosine, arginine, lysine, cysteine, general formula 1, general formula 2, or absent
  MOD_RES (31)..(39): P31 to Xaa39 are repeated for 0 or 1 time
  MOD_RES (32)..(32): serine, lysine, cysteine, deletion, general formula 1, or general formula 2
  MOD_RES (33)..(33): serine, lysine, cysteine, general formula 1, general formula 2, or absent
  MOD_RES (35)..(35): alanine, lysine, cysteine, general formula 1, general formula 2, or absent
  MOD_RES (39)..(39): serine, serine-NH2, cysteine, cysteine-NH2, lysine, lysine-NH2, or absent, or is a linking or spacer group + XE40, wherein XE40 is a lysine, cysteine, general formula 3, or general formula 4
XXEGTFTSDXSXQXEEEAVXLFIEWLXCXXPXXGXPPPX

SEQ ID NO: 277 - protein, 39 aa, Unknown
  Description of Unknown: GLP-1 receptor binding polypeptide
  MOD_RES (1)..(1): histidine, D-histidine, deamino-histidine, Beta-hydroxyl-histidine, homohistidine, alpha-fluoromethyl- histidine, alpha-methyl-histidine, N-methyl-histidine, Nalpha-acetyl-histidine,
  MOD_RES (1)..(1): alpha-methyl-histidine, 2-pyridinyl-alanine, 3-pyridinyl- alanine, 4-pyridinyl-alanine, imidazopropionyl, arginine, or tyrosine
  MOD_RES (2)..(2): glycine, alanine, 2-methylalanine, D-serine, serine, threonine, leucine, isoleucine, valine, aminocyclopropanecarboxylic acid, aminocyclobutanecarboxylic acid, aminocyclopentanecarboxylic acid,
  MOD_RES (2)..(2): aminocyclohexanecarboxylic acid, aminocycloheptanecarboxylic acid, or aminocyclooctanecarboxylic acid
  MOD_RES (10)..(10): leucine, isoleucine, tyrosine, valine, alanine, lysine, cysteine, general formula 1, general formula 2, or pentaglycine
  MOD_RES (12)..(12): lysine, cysteine, arginine, serine, isoleucine, or general formula 1, or general formula 2
  MOD_RES (14)..(14): methionine, leucine, norleucine, isoleucine, alanine, valine, or general formula 1, or general formula 2
  MOD_RES (20)..(20): lysine, glutamine, cysteine, arginine, general formula 1, or general formula 2
  MOD_RES (28)..(28): asparagine, lysine, cysteine, arginine, alanine, general formula 1, or general formula 2
  MOD_RES (29)..(29): -NH2, glycine, glutamine, threonine, lysine, cysteine, or absent
  MOD_RES (30)..(30): -NH2, glycine, tyrosine, arginine, lysine, cysteine, general formula 1, general formula 2, or absent
  MOD_RES (31)..(39): P31 to Xaa39 are repeated for 0 or 1 time
  MOD_RES (32)..(32): serine, lysine, cysteine, deletion, general formula 1, or general formula 2
  MOD_RES (33)..(33): serine, lysine, cysteine, general formula 1, general formula 2, or absent
  MOD_RES (35)..(35): alanine, lysine, cysteine, general formula 1, general formula 2, or absent
  MOD_RES (39)..(39): serine, serine-NH2, cysteine, cysteine-NH2, lysine, lysine-NH2, or absent, or is a linking or spacer group + XE40, wherein XE40 is a lysine, cysteine, general formula 3, or general formula 4
XXEGTFTSDXSXQXEEEAVXLFIEWLCXXXPXXGXPPPX

SEQ ID NO: 278 - protein, 39 aa, Unknown
  Description of Unknown: GLP-1 receptor binding polypeptide
  MOD_RES (1)..(1): histidine, D-histidine, deamino-histidine, Beta-hydroxyl-histidine, homohistidine, alpha-fluoromethyl- histidine, alpha-methyl-histidine, N-methyl-histidine, Nalpha-acetyl-histidine,
  MOD_RES (1)..(1): alpha-methyl-histidine, 2-pyridinyl-alanine, 3-pyridinyl- alanine, 4-pyridinyl-alanine, imidazopropionyl, arginine, or tyrosine
  MOD_RES (2)..(2): glycine, alanine, 2-methylalanine, D-serine, serine, threonine, leucine, isoleucine, valine, aminocyclopropanecarboxylic acid, aminocyclobutanecarboxylic acid, aminocyclopentanecarboxylic acid,
  MOD_RES (2)..(2): aminocyclohexanecarboxylic acid, aminocycloheptanecarboxylic acid, or aminocyclooctanecarboxylic acid
  MOD_RES (10)..(10): leucine, isoleucine, tyrosine, valine, alanine, lysine, cysteine, general formula 1, general formula 2, or pentaglycine
  MOD_RES (12)..(12): lysine, cysteine, arginine, serine, isoleucine, or general formula 1, or general formula 2
  MOD_RES (14)..(14): methionine, leucine, norleucine, isoleucine, alanine, valine, or general formula 1, or general formula 2
  MOD_RES (27)..(27): lysine, cysteine, asparagine, leucine, valine, arginine, general formula 1, or general formula 2
  MOD_RES (28)..(28): asparagine, lysine, cysteine, arginine, alanine, general formula 1, or general formula 2
  MOD_RES (29)..(29): -NH2, glycine, glutamine, threonine, lysine, cysteine, or absent
  MOD_RES (30)..(30): -NH2, glycine, tyrosine, arginine, lysine, cysteine, general formula 1, general formula 2, or absent
  MOD_RES (31)..(39): P31 to Xaa39 are repeated for 0 or 1 time
  MOD_RES (32)..(32): serine, lysine, cysteine, deletion, general formula 1, or general formula 2
  MOD_RES (33)..(33): serine, lysine, cysteine, general formula 1, general formula 2, or absent
  MOD_RES (35)..(35): alanine, lysine, cysteine, general formula 1, general formula 2, or absent
  MOD_RES (39)..(39): serine, serine-NH2, cysteine, cysteine-NH2, lysine, lysine-NH2, or absent, or is a linking or spacer group + XE40, wherein XE40 is a lysine, cysteine, general formula 3, or general formula 4
XXEGTFTSDXSXQXEEEAVCLFIEWLXXXXPXXGXPPPX

SEQ ID NO: 279 - protein, 39 aa, Unknown
  Description of Unknown: GLP-1 receptor binding polypeptide
  MOD_RES (1)..(1): histidine, D-histidine, deamino-histidine, Beta-hydroxyl-histidine, homohistidine, alpha-fluoromethyl- histidine, alpha-methyl-histidine, N-methyl-histidine, Nalpha-acetyl-histidine,
  MOD_RES (1)..(1): alpha-methyl-histidine, 2-pyridinyl-alanine, 3-pyridinyl- alanine, 4-pyridinyl-alanine, imidazopropionyl, arginine, or tyrosine
  MOD_RES (2)..(2): glycine, alanine, 2-methylalanine, D-serine, serine, threonine, leucine, isoleucine, valine, aminocyclopropanecarboxylic acid, aminocyclobutanecarboxylic acid, aminocyclopentanecarboxylic acid,
  MOD_RES (2)..(2): aminocyclohexanecarboxylic acid, aminocycloheptanecarboxylic acid, or aminocyclooctanecarboxylic acid
  MOD_RES (10)..(10): leucine, isoleucine, tyrosine, valine, alanine, lysine, cysteine, general formula 1, general formula 2, or pentaglycine
  MOD_RES (12)..(12): lysine, cysteine, arginine, serine, isoleucine, or general formula 1, or general formula 2
  MOD_RES (20)..(20): lysine, glutamine, cysteine, arginine, general formula 1, or general formula 2
  MOD_RES (27)..(27): lysine, cysteine, asparagine, leucine, valine, arginine, general formula 1, or general formula 2
  MOD_RES (28)..(28): asparagine, lysine, cysteine, arginine, alanine, general formula 1, or general formula 2
  MOD_RES (29)..(29): -NH2, glycine, glutamine, threonine, lysine, cysteine, or absent
  MOD_RES (30)..(30): -NH2, glycine, tyrosine, arginine, lysine, cysteine, general formula 1, general formula 2, or absent
  MOD_RES (31)..(39): P31 to Xaa39 are repeated for 0 or 1 time
  MOD_RES (32)..(32): serine, lysine, cysteine, deletion, general formula 1, or general formula 2
  MOD_RES (33)..(33): serine, lysine, cysteine, general formula 1, general formula 2, or absent
  MOD_RES (35)..(35): alanine, lysine, cysteine, general formula 1, general formula 2, or absent
  MOD_RES (39)..(39): serine, serine-NH2, cysteine, cysteine-NH2, lysine, lysine-NH2, or absent, or is a linking or spacer group + XE40, wherein XE40 is a lysine, cysteine, general formula 3, or general formula 4
XXEGTFTSDXSXQCEEEAVXLFIEWLXXXXPXXGXPPPX

SEQ ID NO: 280 - protein, 39 aa, Unknown
  Description of Unknown: GLP-1 receptor binding polypeptide
  MOD_RES (1)..(1): histidine, D-histidine, deamino-histidine, Beta-hydroxyl-histidine, homohistidine, alpha-fluoromethyl- histidine, alpha-methyl-histidine, N-methyl-histidine, Nalpha-acetyl-histidine,
  MOD_RES (1)..(1): alpha-methyl-histidine, 2-pyridinyl-alanine, 3-pyridinyl- alanine, 4-pyridinyl-alanine, imidazopropionyl, arginine, or tyrosine
  MOD_RES (2)..(2): glycine, alanine, 2-methylalanine, D-serine, serine, threonine, leucine, isoleucine, valine, aminocyclopropanecarboxylic acid, aminocyclobutanecarboxylic acid, aminocyclopentanecarboxylic acid,
  MOD_RES (2)..(2): aminocyclohexanecarboxylic acid, aminocycloheptanecarboxylic acid, or aminocyclooctanecarboxylic acid
  MOD_RES (10)..(10): leucine, isoleucine, tyrosine, valine, alanine, lysine, cysteine, general formula 1, general formula 2, or pentaglycine
  MOD_RES (14)..(14): methionine, leucine, norleucine, isoleucine, alanine, valine, or general formula 1, or general formula 2
  MOD_RES (20)..(20): lysine, glutamine, cysteine, arginine, general formula 1, or general formula 2
  MOD_RES (27)..(27): lysine, cysteine, asparagine, leucine, valine, arginine, general formula 1, or general formula 2
  MOD_RES (28)..(28): asparagine, lysine, cysteine, arginine, alanine, general formula 1, or general formula 2
  MOD_RES (29)..(29): -NH2, glycine, glutamine, threonine, lysine, cysteine, or absent
  MOD_RES (30)..(30): -NH2, glycine, tyrosine, arginine, lysine, cysteine, general formula 1, general formula 2, or absent
  MOD_RES (31)..(39): P31 to Xaa39 are repeated for 0 or 1 time
  MOD_RES (32)..(32): serine, lysine, cysteine, deletion, general formula 1, or general formula 2
  MOD_RES (33)..(33): serine, lysine, cysteine, general formula 1, general formula 2, or absent
  MOD_RES (35)..(35): alanine, lysine, cysteine, general formula 1, general formula 2, or absent
  MOD_RES (39)..(39): serine, serine-NH2, cysteine, cysteine-NH2, lysine, lysine-NH2, or absent, or is a linking or spacer group + XE40, wherein XE40 is a lysine, cysteine, general formula 3, or general formula 4
XXEGTFTSDXSCQXEEEAVXLFIEWLXXXXPXXGXPPPX

SEQ ID NO: 281 - protein, 39 aa, Unknown
  Description of Unknown: GLP-1 receptor binding polypeptide
  MOD_RES (1)..(1): histidine, D-histidine, deamino-histidine, Beta-hydroxyl-histidine, homohistidine, alpha-fluoromethyl- histidine, alpha-methyl-histidine, N-methyl-histidine, Nalpha-acetyl-histidine,
  MOD_RES (1)..(1): alpha-methyl-histidine, 2-pyridinyl-alanine, 3-pyridinyl- alanine, 4-pyridinyl-alanine, imidazopropionyl, arginine, or tyrosine
  MOD_RES (2)..(2): glycine, alanine, 2-methylalanine, D-serine, serine, threonine, leucine, isoleucine, valine, aminocyclopropanecarboxylic acid, aminocyclobutanecarboxylic acid, aminocyclopentanecarboxylic acid,
  MOD_RES (2)..(2): aminocyclohexanecarboxylic acid, aminocycloheptanecarboxylic acid, or aminocyclooctanecarboxylic acid
  MOD_RES (12)..(12): lysine, cysteine, arginine, serine, isoleucine, or general formula 1, or general formula 2
  MOD_RES (14)..(14): methionine, leucine, norleucine, isoleucine, alanine, valine, or general formula 1, or general formula 2
  MOD_RES (20)..(20): lysine, glutamine, cysteine, arginine, general formula 1, or general formula 2
  MOD_RES (27)..(27): lysine, cysteine, asparagine, leucine, valine, arginine, general formula 1, or general formula 2
  MOD_RES (28)..(28): asparagine, lysine, cysteine, arginine, alanine, general formula 1, or general formula 2
  MOD_RES (29)..(29): -NH2, glycine, glutamine, threonine, lysine, cysteine, or absent
  MOD_RES (30)..(30): -NH2, glycine, tyrosine, arginine, lysine, cysteine, general formula 1, general formula 2, or absent
  MOD_RES (31)..(39): P31 to Xaa39 are repeated for 0 or 1 time
  MOD_RES (32)..(32): serine, lysine, cysteine, deletion, general formula 1, or general formula 2
  MOD_RES (33)..(33): serine, lysine, cysteine, general formula 1, general formula 2, or absent
  MOD_RES (35)..(35): alanine, lysine, cysteine, general formula 1, general formula 2, or absent
  MOD_RES (39)..(39): serine, serine-NH2, cysteine, cysteine-NH2, lysine, lysine-NH2, or absent, or is a linking or spacer group + XE40, wherein XE40 is a lysine, cysteine, general formula 3, or general formula 4
XXEGTFTSDCSXQXEEEAVXLFIEWLXXXXPXXGXPPPX

SEQ ID NO: 282 - protein, 40 aa, Unknown
  Description of Unknown: GLP-1 receptor binding polypeptide
HGEGTFTSDLSKQMEEEAVRLFIEWLKNGGPSSGAPPPSC

SEQ ID NO: 283 - protein, 9 aa, Artificial Sequence
  Description of Artificial Sequence: Synthetic fusion protein
  MOD_RES (1)..(1): GLP-1
  MOD_RES (9)..(9): IgG Fc
PSSGAPPPS

SEQ ID NO: 284 - protein, 39 aa, Unknown
  Description of Unknown: GLP-1 receptor binding polypeptide
HGEGTFTSDLSKQMEEEAVRLFIEWLKNGGPSSGCPPPS

SEQ ID NO: 285 - protein, 39 aa, Unknown
  Description of Unknown: GLP-1 receptor binding polypeptide
HGEGTFTSDLSKQMEEEAVRLFIEWLKNGGPSCGAPPPS

SEQ ID NO: 286 - protein, 39 aa, Unknown
  Description of Unknown: GLP-1 receptor binding polypeptide
HGEGTFTSDLSKQMEEEAVRLFIEWLKNGGPCSGAPPPS

SEQ ID NO: 287 - protein, 39 aa, Unknown
  Description of Unknown: GLP-1 receptor binding polypeptide
HGEGTFTSDLSKQMEEEAVRLFIEWLKNGCPSSGAPPPS

SEQ ID NO: 288 - protein, 39 aa, Unknown
  Description of Unknown: GLP-1 receptor binding polypeptide
HGEGTFTSDLSKQMEEEAVRLFIEWLKNCGPSSGAPPPS

SEQ ID NO: 289 - protein, 39 aa, Unknown
  Description of Unknown: GLP-1 receptor binding polypeptide
HGEGTFTSDLSKQMEEEAVRLFIEWLKCGGPSSGAPPPS

SEQ ID NO: 290 - protein, 13 aa, Unknown
  Description of Unknown: amino acid residues at the N-terminal of Fc
AEPKSCDKTHTCP

SEQ ID NO: 291 - protein, 39 aa, Unknown
  Description of Unknown: GLP-1 receptor binding polypeptide
HGEGTFTSDLSKQMEEEAVRLFIECLKNGGPSSGAPPPS

SEQ ID NO: 292 - protein, 39 aa, Unknown
  Description of Unknown: GLP-1 receptor binding polypeptide
HGEGTFTSDLSKQMEEEAVCLFIEWLKNGGPSSGAPPPS

SEQ ID NO: 293 - protein, 39 aa, Unknown
  Description of Unknown: GLP-1 receptor binding polypeptide
HGEGTFTSDLSKQCEEEAVRLFIEWLKNGGPSSGAPPPS

SEQ ID NO: 294 - protein, 39 aa, Unknown
  Description of Unknown: GLP-1 receptor binding polypeptide
HGEGTFTSDLSCQMEEEAVRLFIEWLKNGGPSSGAPPPS

SEQ ID NO: 295 - protein, 39 aa, Unknown
  Description of Unknown: GLP-1 receptor binding polypeptide
HGEGTFTSDCSKQMEEEAVRLFIEWLKNGGPSSGAPPPS

SEQ ID NO: 296 - protein, 31 aa, Unknown
  Description of Unknown: GLP-1 receptor binding polypeptide
HGEGTFTSDLSKQMEEEAVRLFIEWLKNGGC

SEQ ID NO: 297 - protein, 39 aa, Unknown
  Description of Unknown: GLP-1 receptor binding polypeptide
  MOD_RES (1)..(1): histidine, D-histidine, deamino-histidine, Beta-hydroxyl-histidine, homohistidine, alpha-fluoromethyl- histidine, alpha-methyl-histidine, N-methyl-histidine, Nalpha-acetyl-histidine,
  MOD_RES (1)..(1): alpha-methyl-histidine, 2-pyridinyl-alanine, 3-pyridinyl- alanine, 4-pyridinyl-alanine, imidazopropionyl, arginine, or tyrosine
  MOD_RES (2)..(2): glycine, alanine, 2-methylalanine, D-serine, serine, threonine, leucine, isoleucine, valine, aminocyclopropanecarboxylic acid, aminocyclobutanecarboxylic acid, aminocyclopentanecarboxylic acid,
  MOD_RES (2)..(2): aminocyclohexanecarboxylic acid, aminocycloheptanecarboxylic acid, or aminocyclooctanecarboxylic acid
  MOD_RES (10)..(10): leucine, isoleucine, tyrosine, valine, alanine, lysine, cysteine, general formula 1, general formula 2, or pentaglycine
  MOD_RES (12)..(12): lysine, cysteine, arginine, serine, isoleucine, or general formula 1, or general formula 2
  MOD_RES (14)..(14): methionine, leucine, norleucine, isoleucine, alanine, valine, or general formula 1, or general formula 2
  MOD_RES (20)..(20): lysine, glutamine, cysteine, arginine, general formula 1, or general formula 2
  MOD_RES (27)..(27): lysine, cysteine, asparagine, leucine, valine, arginine, general formula 1, or general formula 2
  MOD_RES (28)..(28): asparagine, lysine, cysteine, arginine, alanine, general formula 1, or general formula 2
  MOD_RES (29)..(29): -NH2, glycine, glutamine, threonine, lysine, cysteine, or absent
  MOD_RES (30)..(30): -NH2, glycine, tyrosine, arginine, lysine, cysteine, general formula 1, general formula 2, or absent
  MOD_RES (31)..(39): P31 to K39 are repeated for 0 or 1 time
  MOD_RES (32)..(32): serine, lysine, cysteine, deletion, general formula 1, or general formula 2
  MOD_RES (33)..(33): serine, lysine, cysteine, general formula 1, general formula 2, or absent
  MOD_RES (35)..(35): alanine, lysine, cysteine, general formula 1, general formula 2, or absent
XXEGTFTSDXSXQXEEEAVXLFIEWLXXXXPXXGXPPPK

SEQ ID NO: 298 - protein, 39 aa, Unknown
  Description of Unknown: GLP-1 receptor binding polypeptide
  MOD_RES (1)..(1): histidine, D-histidine, deamino-histidine, Beta-hydroxyl-histidine, homohistidine, alpha-fluoromethyl- histidine, alpha-methyl-histidine, N-methyl-histidine, Nalpha-acetyl-histidine,
  MOD_RES (1)..(1): alpha-methyl-histidine, 2-pyridinyl-alanine, 3-pyridinyl- alanine, 4-pyridinyl-alanine, imidazopropionyl, arginine, or tyrosine
  MOD_RES (2)..(2): glycine, alanine, 2-methylalanine, D-serine, serine, threonine, leucine, isoleucine, valine, aminocyclopropanecarboxylic acid, aminocyclobutanecarboxylic acid, aminocyclopentanecarboxylic acid,
  MOD_RES (2)..(2): aminocyclohexanecarboxylic acid, aminocycloheptanecarboxylic acid, or aminocyclooctanecarboxylic acid
  MOD_RES (10)..(10): leucine, isoleucine, tyrosine, valine, alanine, lysine, cysteine, general formula 1, general formula 2, or pentaglycine
  MOD_RES (12)..(12): lysine, cysteine, arginine, serine, isoleucine, or general formula 1, or general formula 2
  MOD_RES (14)..(14): methionine, leucine, norleucine, isoleucine, alanine, valine, or general formula 1, or general formula 2
  MOD_RES (20)..(20): lysine, glutamine, cysteine, arginine, general formula 1, or general formula 2
  MOD_RES (27)..(27): lysine, cysteine, asparagine, leucine, valine, arginine, general formula 1, or general formula 2
  MOD_RES (28)..(28): asparagine, lysine, cysteine, arginine, alanine, general formula 1, or general formula 2
  MOD_RES (29)..(29): -NH2, glycine, glutamine, threonine, lysine, cysteine, or absent
  MOD_RES (30)..(30): -NH2, glycine, tyrosine, arginine, lysine, cysteine, general formula 1, general formula 2, or absent
  MOD_RES (32)..(32): serine, lysine, cysteine, deletion, general formula 1, or general formula 2
  MOD_RES (33)..(33): serine, lysine, cysteine, general formula 1, general formula 2, or absent
  MOD_RES (39)..(39): Xaa can be any naturally occurring amino acid
XXEGTFTSDXSXQXEEEAVXLFIEWLXXXXPXXGKPPPX

SEQ ID NO: 299 - protein, 39 aa, Unknown
  Description of Unknown: GLP-1 receptor binding polypeptide
  MOD_RES (1)..(1): histidine, D-histidine, deamino-histidine, Beta-hydroxyl-histidine, homohistidine, alpha-fluoromethyl- histidine, alpha-methyl-histidine, N-methyl-histidine, Nalpha-acetyl-histidine,
  MOD_RES (1)..(1): alpha-methyl-histidine, 2-pyridinyl-alanine, 3-pyridinyl- alanine, 4-pyridinyl-alanine, imidazopropionyl, arginine, or tyrosine
  MOD_RES (2)..(2): glycine, alanine, 2-methylalanine, D-serine, serine, threonine, leucine, isoleucine, valine, aminocyclopropanecarboxylic acid, aminocyclobutanecarboxylic acid, aminocyclopentanecarboxylic acid,
  MOD_RES (2)..(2): aminocyclohexanecarboxylic acid, aminocycloheptanecarboxylic acid, or aminocyclooctanecarboxylic acid
  MOD_RES (10)..(10): leucine, isoleucine, tyrosine, valine, alanine, lysine, cysteine, general formula 1, general formula 2, or pentaglycine
  MOD_RES (12)..(12): lysine, cysteine, arginine, serine, isoleucine, or general formula 1, or general formula 2
  MOD_RES (14)..(14): methionine, leucine, norleucine, isoleucine, alanine, valine, or general formula 1, or general formula 2
  MOD_RES (20)..(20): lysine, glutamine, cysteine, arginine, general formula 1, or general formula 2
  MOD_RES (27)..(27): lysine, cysteine, asparagine, leucine, valine, arginine, general formula 1, or general formula 2
  MOD_RES (28)..(28): asparagine, lysine, cysteine, arginine, alanine, general formula 1, or general formula 2
  MOD_RES (29)..(29): -NH2, glycine, glutamine, threonine, lysine, cysteine, or absent
  MOD_RES (30)..(30): -NH2, glycine, tyrosine, arginine, lysine, cysteine, general formula 1, general formula 2, or absent
  MOD_RES (31)..(39): P31 to Xaa39 are repeated for 0 or 1 time
  MOD_RES (32)..(32): serine, lysine, cysteine, deletion, general formula 1, or general formula 2
  MOD_RES (35)..(35): alanine, lysine, cysteine, general formula 1, general formula 2, or absent
  MOD_RES (39)..(39): serine, serine-NH2, cysteine, cysteine-NH2, lysine, lysine-NH2, or absent, or is a linking or spacer group + XE40, wherein XE40 is a lysine, cysteine, general formula 3, or general formula 4
XXEGTFTSDXSXQXEEEAVXLFIEWLXXXXPXKGXPPPX

SEQ ID NO: 300 - protein, 39 aa, Unknown
  Description of Unknown: GLP-1 receptor binding polypeptide
  MOD_RES (1)..(1): histidine, D-histidine, deamino-histidine, Beta-hydroxyl-histidine, homohistidine, alpha-fluoromethyl- histidine, alpha-methyl-histidine, N-methyl-histidine, Nalpha-acetyl-histidine,
  MOD_RES (1)..(1): alpha-methyl-histidine, 2-pyridinyl-alanine, 3-pyridinyl- alanine, 4-pyridinyl-alanine, imidazopropionyl, arginine, or tyrosine
  MOD_RES (2)..(2): glycine, alanine, 2-methylalanine, D-serine, serine, threonine, leucine, isoleucine, valine, aminocyclopropanecarboxylic acid, aminocyclobutanecarboxylic acid, aminocyclopentanecarboxylic acid,
  MOD_RES (2)..(2): aminocyclohexanecarboxylic acid, aminocycloheptanecarboxylic acid, or aminocyclooctanecarboxylic acid
  MOD_RES (10)..(10): leucine, isoleucine, tyrosine, valine, alanine, lysine, cysteine, general formula 1, general formula 2, or pentaglycine
  MOD_RES (12)..(12): lysine, cysteine, arginine, serine, isoleucine, or general formula 1, or general formula 2
  MOD_RES (14)..(14): methionine, leucine, norleucine, isoleucine, alanine, valine, or general formula 1, or general formula 2
  MOD_RES (20)..(20): lysine, glutamine, cysteine, arginine, general formula 1, or general formula 2
  MOD_RES (27)..(27): lysine, cysteine, asparagine, leucine, valine, arginine, general formula 1, or general formula 2
  MOD_RES (28)..(28): asparagine, lysine, cysteine, arginine, alanine, general formula 1, or general formula 2
  MOD_RES (29)..(29): -NH2, glycine, glutamine, threonine, lysine, cysteine, or absent
  MOD_RES (30)..(30): -NH2, glycine, tyrosine, arginine, lysine, cysteine, general formula 1, general formula 2, or absent
  MOD_RES (31)..(39): P31 to Xaa39 are repeated for 0 or 1 time
  MOD_RES (33)..(33): serine, lysine, cysteine, general formula 1, general formula 2, or absent
  MOD_RES (35)..(35): alanine, lysine, cysteine, general formula 1, general formula 2, or absent
  MOD_RES (39)..(39): serine, serine-NH2, cysteine, cysteine-NH2, lysine, lysine-NH2, or absent, or is a linking or spacer group + XE40, wherein XE40 is a lysine, cysteine, general formula 3, or general formula 4
XXEGTFTSDXSXQXEEEAVXLFIEWLXXXXPKXGXPPPX

SEQ ID NO: 301 - protein, 39 aa, Unknown
  Description of Unknown: GLP-1 receptor binding polypeptide
  MOD_RES (1)..(1): histidine, D-histidine, deamino-histidine, Beta-hydroxyl-histidine, homohistidine, alpha-fluoromethyl- histidine, alpha-methyl-histidine, N-methyl-histidine, Nalpha-acetyl-histidine,
  MOD_RES (1)..(1): alpha-methyl-histidine, 2-pyridinyl-alanine, 3-pyridinyl- alanine, 4-pyridinyl-alanine, imidazopropionyl, arginine, or tyrosine
  MOD_RES (2)..(2): glycine, alanine, 2-methylalanine, D-serine, serine, threonine, leucine, isoleucine, valine, aminocyclopropanecarboxylic acid, aminocyclobutanecarboxylic acid, aminocyclopentanecarboxylic acid,
  MOD_RES (2)..(2): aminocyclohexanecarboxylic acid, aminocycloheptanecarboxylic acid, or aminocyclooctanecarboxylic acid
  MOD_RES (10)..(10): leucine, isoleucine, tyrosine, valine, alanine, lysine, cysteine, general formula 1, general formula 2, or pentaglycine
  MOD_RES (12)..(12): lysine, cysteine, arginine, serine, isoleucine, or general formula 1, or general formula 2
  MOD_RES (14)..(14): methionine, leucine, norleucine, isoleucine, alanine, valine, or general formula 1, or general formula 2
  MOD_RES (20)..(20): lysine, glutamine, cysteine, arginine, general formula 1, or general formula 2
  MOD_RES (27)..(27): lysine, cysteine, asparagine, leucine, valine, arginine, general formula 1, or general formula 2
  MOD_RES (28)..(28): asparagine, lysine, cysteine, arginine, alanine, general formula 1, or general formula 2
  MOD_RES (29)..(29): -NH2, glycine, glutamine, threonine, lysine, cysteine, or absent
  MOD_RES (31)..(39): P31 to Xaa39 are repeated for 0 or 1 time
  MOD_RES (32)..(32): serine, lysine, cysteine, deletion, general formula 1, or general formula 2
  MOD_RES (33)..(33): serine, lysine, cysteine, general formula 1, general formula 2, or absent
  MOD_RES (35)..(35): alanine, lysine, cysteine, general formula 1, general formula 2, or absent
  MOD_RES (39)..(39): serine, serine-NH2, cysteine, cysteine-NH2, lysine, lysine-NH2, or absent, or is a linking or spacer group + XE40, wherein XE40 is a lysine, cysteine, general formula 3, or general formula 4
XXEGTFTSDXSXQXEEEAVXLFIEWLXXXKPXXGXPPPX

SEQ ID NO: 302 - protein, 39 aa, Unknown
  Description of Unknown: GLP-1 receptor binding polypeptide
  MOD_RES (1)..(1): histidine, D-histidine, deamino-histidine, Beta-hydroxyl-histidine, homohistidine, alpha-fluoromethyl- histidine, alpha-methyl-histidine, N-methyl-histidine, Nalpha-acetyl-histidine,alpha-methyl-histidine, 2-pyridinyl-
  MOD_RES (1)..(1): alanine, 3-pyridinyl-alanine,4-pyridinyl-alanine, imidazopropionyl, arginine, or tyrosine
  MOD_RES (2)..(2): glycine, alanine, 2-methylalanine, D-serine, serine, threonine, leucine, isoleucine, valine, aminocyclopropanecarboxylic acid, aminocyclobutanecarboxylic acid, aminocyclopentanecarboxylic acid,
  MOD_RES (2)..(2): aminocyclohexanecarboxylic acid, aminocycloheptanecarboxylic acid, or aminocyclooctanecarboxylic acid
  MOD_RES (10)..(10): leucine, isoleucine, tyrosine, valine, alanine, lysine, cysteine, general formula 1, general formula 2, or pentaglycine
  MOD_RES (12)..(12): lysine, cysteine, arginine, serine, isoleucine, or general formula 1, or general formula 2
  MOD_RES (14)..(14): methionine, leucine, norleucine, isoleucine, alanine, valine, or general formula 1, or general formula 2
  MOD_RES (20)..(20): lysine, glutamine, cysteine, arginine, general formula 1, or general formula 2
  MOD_RES (27)..(27): lysine, cysteine, asparagine, leucine, valine, arginine, general formula 1, or general formula 2
  MOD_RES (28)..(28): asparagine, lysine, cysteine, arginine, alanine, general formula 1, or general formula 2
  MOD_RES (30)..(30): -NH2, glycine, tyrosine, arginine, lysine, cysteine, general formula 1, general formula 2, or absent
  MOD_RES (31)..(39): P31 to Xaa39 are repeated for 0 or 1 time
  MOD_RES (32)..(32): serine, lysine, cysteine, deletion, general formula 1, or general formula 2
  MOD_RES (33)..(33): serine, lysine, cysteine, general formula 1, general formula 2, or absent
  MOD_RES (35)..(35): alanine, lysine, cysteine, general formula 1, general formula 2, or absent
  MOD_RES (39)..(39): serine, serine-NH2, cysteine, cysteine-NH2, lysine, lysine-NH2, or absent, or is a linking or spacer group + XE40, wherein XE40 is a lysine, cysteine, general formula 3, or general formula 4
XXEGTFTSDXSXQXEEEAVXLFIEWLXXKXPXXGXPPPX

SEQ ID NO: 303 - protein, 39 aa, Unknown
  Description of Unknown: GLP-1 receptor binding polypeptide
  MOD_RES (1)..(1): histidine, D-histidine, deamino-histidine, Beta-hydroxyl-histidine, homohistidine, alpha-fluoromethyl- histidine, alpha-methyl-histidine, N-methyl-histidine, Nalpha-acetyl-histidine,
  MOD_RES (1)..(1): alpha-methyl-histidine, 2-pyridinyl-alanine, 3-pyridinyl- alanine, 4-pyridinyl-alanine, imidazopropionyl, arginine, or tyrosine
  MOD_RES (2)..(2): glycine, alanine, 2-methylalanine, D-serine, serine, threonine, leucine, isoleucine, valine, aminocyclopropanecarboxylic acid, aminocyclobutanecarboxylic acid, aminocyclopentanecarboxylic acid,
  MOD_RES (2)..(2): aminocyclohexanecarboxylic acid, aminocycloheptanecarboxylic acid, or aminocyclooctanecarboxylic acid
  MOD_RES (10)..(10): leucine, isoleucine, tyrosine, valine, alanine, lysine, cysteine, general formula 1, general formula 2, or pentaglycine
  MOD_RES (12)..(12): lysine, cysteine, arginine, serine, isoleucine, or general formula 1, or general formula 2
  MOD_RES (14)..(14): methionine, leucine, norleucine, isoleucine, alanine, valine, or general formula 1, or general formula 2
  MOD_RES (20)..(20): lysine, glutamine, cysteine, arginine, general formula 1, or general formula 2
  MOD_RES (27)..(27): lysine, cysteine, asparagine, leucine, valine, arginine, general formula 1, or general formula 2
  MOD_RES (29)..(29): -NH2, glycine, glutamine, threonine, lysine, cysteine, or absent
  MOD_RES (30)..(30): -NH2, glycine, tyrosine, arginine, lysine, cysteine, general formula 1, general formula 2, or absent
  MOD_RES (31)..(39): P31 to Xaa39 are repeated for 0 or 1 time
  MOD_RES (32)..(32): serine, lysine, cysteine, deletion, general formula 1, or general formula 2
  MOD_RES (33)..(33): serine, lysine, cysteine, general formula 1, general formula 2, or absent
  MOD_RES (35)..(35): alanine, lysine, cysteine, general formula 1, general formula 2, or absent
  MOD_RES (39)..(39): serine, serine-NH2, cysteine, cysteine-NH2, lysine, lysine-NH2, or absent, or is a linking or spacer group + XE40, wherein XE40 is a lysine, cysteine, general formula 3, or general formula 4
XXEGTFTSDXSXQXEEEAVXLFIEWLXKXXPXXGXPPPX

SEQ ID NO: 304 - protein, 39 aa, Unknown
  Description of Unknown: GLP-1 receptor binding polypeptide
  MOD_RES (1)..(1): histidine, D-histidine, deamino-histidine, Beta-hydroxyl-histidine, homohistidine, alpha-fluoromethyl- histidine, alpha-methyl-histidine, N-methyl-histidine, Nalpha-acetyl-histidine,
  MOD_RES (1)..(1): alpha-methyl-histidine, 2-pyridinyl-alanine, 3-pyridinyl- alanine, 4-pyridinyl-alanine, imidazopropionyl, arginine, or tyrosine
  MOD_RES (2)..(2): glycine, alanine, 2-methylalanine, D-serine, serine, threonine, leucine, isoleucine, valine, aminocyclopropanecarboxylic acid, aminocyclobutanecarboxylic acid, aminocyclopentanecarboxylic acid,
  MOD_RES (2)..(2): aminocyclohexanecarboxylic acid, aminocycloheptanecarboxylic acid, or aminocyclooctanecarboxylic acid
  MOD_RES (10)..(10): leucine, isoleucine, tyrosine, valine, alanine, lysine, cysteine, general formula 1, general formula 2, or pentaglycine
  MOD_RES (12)..(12): lysine, cysteine, arginine, serine, isoleucine, or general formula 1, or general formula 2
  MOD_RES (14)..(14): methionine, leucine, norleucine, isoleucine, alanine, valine, or general formula 1, or general formula 2
  MOD_RES (20)..(20): lysine, glutamine, cysteine, arginine, general formula 1, or general formula 2
  MOD_RES (28)..(28): asparagine, lysine, cysteine, arginine, alanine, general formula 1, or general formula 2
  MOD_RES (29)..(29): -NH2, glycine, glutamine, threonine, lysine, cysteine, or absent
  MOD_RES (30)..(30): -NH2, glycine, tyrosine, arginine, lysine, cysteine, general formula 1, general formula 2, or absent
  MOD_RES (31)..(39): P31 to Xaa39 are repeated for 0 or 1 time
  MOD_RES (32)..(32): serine, lysine, cysteine, deletion, general formula 1, or general formula 2
  MOD_RES (33)..(33): serine, lysine, cysteine, general formula 1, general formula 2, or absent
  MOD_RES (35)..(35): alanine, lysine, cysteine, general formula 1, general formula 2, or absent
  MOD_RES (39)..(39): serine, serine-NH2, cysteine, cysteine-NH2, lysine, lysine-NH2, or absent, or is a linking or spacer group + XE40, wherein XE40 is a lysine, cysteine, general formula 3, or general formula 4
XXEGTFTSDXSXQXEEEAVXLFIEWLKXXXPXXGXPPPX

SEQ ID NO: 305 - protein, 39 aa, Unknown
  Description of Unknown: GLP-1 receptor binding polypeptide
  MOD_RES (1)..(1): histidine, D-histidine, deamino-histidine, Beta-hydroxyl-histidine, homohistidine, alpha-fluoromethyl- histidine, alpha-methyl-histidine, N-methyl-histidine, Nalpha-acetyl-histidine,
  MOD_RES (1)..(1): alpha-methyl-histidine, 2-pyridinyl-alanine, 3-pyridinyl- alanine, 4-pyridinyl-alanine, imidazopropionyl, arginine, or tyrosine
  MOD_RES (2)..(2): glycine, alanine, 2-methylalanine, D-serine, serine, threonine, leucine, isoleucine, valine, aminocyclopropanecarboxylic acid, aminocyclobutanecarboxylic acid, aminocyclopentanecarboxylic acid,
  MOD_RES (2)..(2): aminocyclohexanecarboxylic acid, aminocycloheptanecarboxylic acid, or aminocyclooctanecarboxylic acid
  MOD_RES (10)..(10): leucine, isoleucine, tyrosine, valine, alanine, lysine, cysteine, general formula 1, general formula 2, or pentaglycine
  MOD_RES (12)..(12): lysine, cysteine, arginine, serine, isoleucine, or general formula 1, or general formula 2
  MOD_RES (14)..(14): methionine, leucine, norleucine, isoleucine, alanine, valine, or general formula 1, or general formula 2
  MOD_RES (27)..(27): methionine, leucine, norleucine, isoleucine, alanine, valine, or general formula 1, or general formula 2
  MOD_RES (28)..(28): asparagine, lysine, cysteine, arginine, alanine, general formula 1, or general formula 2
  MOD_RES (29)..(29): -NH2, glycine, glutamine, threonine, lysine, cysteine, or absent
  MOD_RES (30)..(30): -NH2, glycine, tyrosine, arginine, lysine, cysteine, general formula 1, general formula 2, or absent
  MOD_RES (31)..(39): P31 to Xaa39 are repeated for 0 or 1 time
  MOD_RES (32)..(32): serine, lysine, cysteine, deletion, general formula 1, or general formula 2
  MOD_RES (33)..(33): serine, lysine, cysteine, general formula 1, general formula 2, or absent
  MOD_RES (35)..(35): alanine, lysine, cysteine, general formula 1, general formula 2, or absent
  MOD_RES (39)..(39): serine, serine-NH2, cysteine, cysteine-NH2, lysine, lysine-NH2, or absent, or is a linking or spacer group + XE40, wherein XE40 is a lysine, cysteine, general formula 3, or general formula 4
XXEGTFTSDXSXQXEEEAVKLFIEWLXXXXPXXGXPPPX

SEQ ID NO: 306 - protein, 39 aa, Unknown
  Description of Unknown: GLP-1 receptor binding polypeptide
  MOD_RES (1)..(1): histidine, D-histidine, deamino-histidine, Beta-hydroxyl-histidine, homohistidine, alpha-fluoromethyl- histidine, alpha-methyl-histidine, N-methyl-histidine, Nalpha-acetyl-histidine,
  MOD_RES (1)..(1): alpha-methyl-histidine, 2-pyridinyl-alanine, 3-pyridinyl- alanine, 4-pyridinyl-alanine, imidazopropionyl, arginine, or tyrosine
  MOD_RES (2)..(2): glycine, alanine, 2-methylalanine, D-serine, serine, threonine, leucine, isoleucine, valine, aminocyclopropanecarboxylic acid, aminocyclobutanecarboxylic acid, aminocyclopentanecarboxylic acid,
  MOD_RES (2)..(2): aminocyclohexanecarboxylic acid, aminocycloheptanecarboxylic acid, or aminocyclooctanecarboxylic acid
  MOD_RES (10)..(10): leucine, isoleucine, tyrosine, valine, alanine, lysine, cysteine, general formula 1, general formula 2, or pentaglycine
  MOD_RES (12)..(12): lysine, cysteine, arginine, serine, isoleucine, or general formula 1, or general formula 2
  MOD_RES (20)..(20): lysine, glutamine, cysteine, arginine, general formula 1, or general formula 2
  MOD_RES (27)..(27): lysine, cysteine, asparagine, leucine, valine, arginine, general formula 1, or general formula 2
  MOD_RES (28)..(28): asparagine, lysine, cysteine, arginine, alanine, general formula 1, or general formula 2
  MOD_RES (29)..(29): -NH2, glycine, glutamine, threonine, lysine, cysteine, or absent
  MOD_RES (30)..(30): -NH2, glycine, tyrosine, arginine, lysine, cysteine, general formula 1, general formula 2, or absent
  MOD_RES (31)..(39): P31 to Xaa39 are repeated for 0 or 1 time
  MOD_RES (32)..(32): serine, lysine, cysteine, deletion, general formula 1, or general formula 2
  MOD_RES (33)..(33): serine, lysine, cysteine, general formula 1, general formula 2, or absent
  MOD_RES (35)..(35): alanine, lysine, cysteine, general formula 1, general formula 2, or absent
  MOD_RES (39)..(39): serine, serine-NH2, cysteine, cysteine-NH2, lysine, lysine-NH2, or absent, or is a linking or spacer group + XE40, wherein XE40 is a lysine, cysteine, general formula 3, or general formula 4
XXEGTFTSDXSXQKEEEAVXLFIEWLXXXXPXXGXPPPX

SEQ ID NO: 307 - protein, 39 aa, Unknown
  Description of Unknown: GLP-1 receptor binding polypeptide
  MOD_RES (1)..(1): histidine, D-histidine, deamino-histidine, Beta-hydroxyl-histidine, homohistidine, alpha-fluoromethyl- histidine, alpha-methyl-histidine, N-methyl-histidine, Nalpha-acetyl-histidine,
  MOD_RES (1)..(1): alpha-methyl-histidine, 2-pyridinyl-alanine, 3-pyridinyl- alanine, 4-pyridinyl-alanine, imidazopropionyl, arginine, or tyrosine
  MOD_RES (2)..(2): glycine, alanine, 2-methylalanine, D-serine, serine, threonine, leucine, isoleucine, valine, aminocyclopropanecarboxylic acid, aminocyclobutanecarboxylic acid, aminocyclopentanecarboxylic acid,
  MOD_RES (2)..(2): aminocyclohexanecarboxylic acid, aminocycloheptanecarboxylic acid, or aminocyclooctanecarboxylic acid
  MOD_RES (10)..(10): leucine, isoleucine, tyrosine, valine, alanine, lysine, cysteine, general formula 1, general formula 2, or pentaglycine
  MOD_RES (14)..(14): methionine, leucine, norleucine, isoleucine, alanine, valine, or general formula 1, or general formula 2
  MOD_RES (20)..(20): lysine, glutamine, cysteine, arginine, general formula 1, or general formula 2
  MOD_RES (27)..(27): lysine, cysteine, asparagine, leucine, valine, arginine, general formula 1, or general formula 2
  MOD_RES (28)..(28): asparagine, lysine, cysteine, arginine, alanine, general formula 1, or general formula 2
  MOD_RES (29)..(29): -NH2, glycine, glutamine, threonine, lysine, cysteine, or absent
  MOD_RES (30)..(30): -NH2, glycine, tyrosine, arginine, lysine, cysteine, general formula 1, general formula 2, or absent
  MOD_RES (31)..(39): P31 to Xaa39 are repeated for 0 or 1 time
  MOD_RES (32)..(32): serine, lysine, cysteine, deletion, general formula 1, or general formula 2
  MOD_RES (33)..(33): serine, lysine, cysteine, general formula 1, general formula 2, or absent
  MOD_RES (35)..(35): alanine, lysine, cysteine, general formula 1, general formula 2, or absent
  MOD_RES (39)..(39): serine, serine-NH2, cysteine, cysteine-NH2, lysine, lysine-NH2, or absent, or is a linking or spacer group + XE40, wherein XE40 is a lysine, cysteine, general formula 3, or general formula 4
XXEGTFTSDXSKQXEEEAVXLFIEWLXXXXPXXGXPPPX

SEQ ID NO: 308 - protein, 39 aa, Unknown
  Description of Unknown: GLP-1 receptor binding polypeptide
  MOD_RES (1)..(1): histidine, D-histidine, deamino-histidine, Beta-hydroxyl-histidine, homohistidine, alpha-fluoromethyl- histidine, alpha-methyl-histidine, N-methyl-histidine, Nalpha-acetyl-histidine,
  MOD_RES (1)..(1): alpha-methyl-histidine, 2-pyridinyl-alanine, 3-pyridinyl- alanine, 4-pyridinyl-alanine, imidazopropionyl, arginine, or tyrosine
  MOD_RES (2)..(2): glycine, alanine, 2-methylalanine, D-serine, serine, threonine, leucine, isoleucine, valine, aminocyclopropanecarboxylic acid, aminocyclobutanecarboxylic acid, aminocyclopentanecarboxylic acid,
  MOD_RES (2)..(2): aminocyclohexanecarboxylic acid, aminocycloheptanecarboxylic acid, or aminocyclooctanecarboxylic acid
  MOD_RES (12)..(12): lysine, cysteine, arginine, serine, isoleucine, or general formula 1, or general formula 2
  MOD_RES (14)..(14): methionine, leucine, norleucine, isoleucine, alanine, valine, or general formula 1, or general formula 2
  MOD_RES (20)..(20): lysine, glutamine, cysteine, arginine, general formula 1, or general formula 2
  MOD_RES (27)..(27): lysine, cysteine, asparagine, leucine, valine, arginine, general formula 1, or general formula 2
  MOD_RES (28)..(28): asparagine, lysine, cysteine, arginine, alanine, general formula 1, or general formula 2
  MOD_RES (29)..(29): -NH2, glycine, glutamine, threonine, lysine, cysteine, or absent
  MOD_RES (30)..(30): -NH2, glycine, tyrosine, arginine, lysine, cysteine, general formula 1, general formula 2, or absent
  MOD_RES (31)..(39): P31 to Xaa39 are repeated for 0 or 1 time
  MOD_RES (32)..(32): serine, lysine, cysteine, deletion, general formula 1, or general formula 2
  MOD_RES (33)..(33): serine, lysine, cysteine, general formula 1, general formula 2, or absent
  MOD_RES (35)..(35): alanine, lysine, cysteine, general formula 1, general formula 2, or absent
  MOD_RES (39)..(39): serine, serine-NH2, cysteine, cysteine-NH2, lysine, lysine-NH2, or absent, or is a linking or spacer group + XE40, wherein XE40 is a lysine, cysteine, general formula 3, or general formula 4
XXEGTFTSDKSXQXEEEAVXLFIEWLXXXXPXXGXPPPX

SEQ ID NO: 309 - protein, 40 aa, Unknown
  Description of Unknown: GLP-1 receptor binding polypeptide
HGEGTFTSDLSRQMEEEAVRLFIEWLRNGGPSSGAPPPSK

SEQ ID NO: 310 - protein, 39 aa, Unknown
  Description of Unknown: GLP-1 receptor binding polypeptide
HGEGTFTSDLSRQMEEEAVRLFIEWLRNGGPSSGAPPPK

SEQ ID NO: 311 - protein, 39 aa, Unknown
  Description of Unknown: GLP-1 receptor binding polypeptide
HGEGTFTSDLSRQMEEEAVRLFIEWLRNGGPSSGKPPPS

SEQ ID NO: 312 - protein, 39 aa, Unknown
  Description of Unknown: GLP-1 receptor binding polypeptide
HGEGTFTSDLSRQMEEEAVRLFIEWLRNGGPSKGAPPPS

SEQ ID NO: 313 - protein, 39 aa, Unknown
  Description of Unknown: GLP-1 receptor binding polypeptide
HGEGTFTSDLSRQMEEEAVRLFIEWLRNGGPKSGAPPPS

SEQ ID NO: 314 - protein, 39 aa, Unknown
  Description of Unknown: GLP-1 receptor binding polypeptide
HGEGTFTSDLSRQMEEEAVRLFIEWLRNGKPSSGAPPPS

SEQ ID NO: 315 - protein, 39 aa, Unknown
  Description of Unknown: GLP-1 receptor binding polypeptide
HGEGTFTSDLSRQMEEEAVRLFIEWLRNKGPSSGAPPPS

SEQ ID NO: 316 - protein, 39 aa, Unknown
  Description of Unknown: GLP-1 receptor binding polypeptide
HGEGTFTSDLSRQMEEEAVRLFIEWLRKGGPSSGAPPPS

SEQ ID NO: 317 - protein, 39 aa, Unknown
  Description of Unknown: GLP-1 receptor binding polypeptide
HGEGTFTSDLSRQMEEEAVRLFIEWLKNGGPSSGAPPPS

SEQ ID NO: 318 - protein, 39 aa, Unknown
  Description of Unknown: GLP-1 receptor binding polypeptide
HGEGTFTSDLSRQMEEEAVRLFIEKLRNGGPSSGAPPPS

SEQ ID NO: 319 - protein, 39 aa, Unknown
  Description of Unknown: GLP-1 receptor binding polypeptide
HGEGTFTSDLSRQMEEEAVKLFIEWLRNGGPSSGAPPPS

SEQ ID NO: 320 - protein, 39 aa, Unknown
  Description of Unknown: GLP-1 receptor binding polypeptide
HGEGTFTSDLSRQKEEEAVRLFIEWLRNGGPSSGAPPPS

SEQ ID NO: 321 - protein, 39 aa, Unknown
  Description of Unknown: GLP-1 receptor binding polypeptide
HGEGTFTSDLSKQMEEEAVRLFIEWLRNGGPSSGAPPPS

SEQ ID NO: 322 - protein, 39 aa, Unknown
  Description of Unknown: GLP-1 receptor binding polypeptide
HGEGTFTSDKSRQMEEEAVRLFIEWLRNGGPSSGAPPPS

SEQ ID NO: 323 - protein, 30 aa, Unknown
  Description of Unknown: GLP-1 receptor binding polypeptide
HGEGTFTSDLSRQMEEEAVRLFIEWLRNGK

SEQ ID NO: 324 - protein, 39 aa, Unknown
  Description of Unknown: GLP-1 receptor binding polypeptide
  MOD_RES (1)..(1): histidine, D-histidine, deamino-histidine, Beta-hydroxyl-histidine, homohistidine, alpha-fluoromethyl- histidine, alpha-methyl-histidine, N-methyl-histidine, Nalpha-acetyl-histidine,
  MOD_RES (1)..(1): alpha-methyl-histidine, 2-pyridinyl-alanine, 3-pyridinyl-alanine, 4-pyridinyl-alanine, imidazopropionyl
  MOD_RES (2)..(2): 2-methylalanine (Aib), glycine, D-serine, serine, threonine, leucine, isoleucine, alanine, valine, aminocyclopropane- carboxylic acid, aminocyclobutanecarboxylic acid, aminocyclopentanecarboxylic acid, aminocyclohexane-
  MOD_RES (2)..(2): carboxylic aminocyclohexanecarboxylic acid, aminocyclo- heptanecarboxylic acid, or aminocyclooctanecarboxylic acid
  MOD_RES (10)..(10): valine, tyrosine, phenylalanine, tryptophan, histidine, leucine, isoleucine, serine, threonine, aspartic acid, glutamic acid, alanine, lysine, arginine, cysteine, general formula 1, or general formula 2
  MOD_RES (12)..(12): serine, isoleucine, lysine, arginine, cysteine, general formula 1, or general formula 2
  MOD_RES (16)..(16): glycine, serine, histidine, glutamic acid, aspartic acid, glutamine, asparagine, lysine, arginine, homoglutamic acid, cysteine, homocysteine, or cysteic acid
  MOD_RES (20)..(20): lysine, arginine, aspartic acid, glutamic acid, glutamine, histidine, 2-methylalanine, cysteine, general formula 1, or general formula 2
  MOD_RES (28)..(28): lysine, arginine, aspartic acid, glutamic acid, alanine, asparagine, cysteine, general formula 1, or general formula 2
  MOD_RES (29)..(29): glycine, glutamine, threonine, serine, lysine, arginine, cysteine, general formula 1, or general formula 2
  MOD_RES (30)..(30): arginine, lysine, glycine, histidine, cysteine, general formula 1, or general formula 2
  MOD_RES (31)..(39): P31 to C39 are repeated for 0 or 1 time
  MOD_RES (32)..(32): serine, lysine, cysteine, deletion, general formula 1, or general formula 2
  MOD_RES (33)..(33): serine, lysine, cysteine, general formula 1, general formula 2, or absent
  MOD_RES (35)..(35): alanine, lysine, cysteine, general formula 1, general formula 2, or absent
XXEGTFTSDXSXYLEXQAAXEFIAWLVXXXPXXGXPPPC

SEQ ID NO: 325 - protein, 39 aa, Unknown
  Description of Unknown: GLP-1 receptor binding polypeptide
  MOD_RES (1)..(1): histidine, D-histidine, deamino-histidine, Beta-hydroxyl-histidine, homohistidine, alpha-fluoromethyl- histidine, alpha-methyl-histidine, N-methyl-histidine, Nalpha-acetyl-histidine,
  MOD_RES (1)..(1): alpha-methyl-histidine, 2-pyridinyl-alanine, 3-pyridinyl- alanine, 4-pyridinyl-alanine, imidazopropionyl
  MOD_RES (2)..(2): 2-methylalanine (Aib), glycine, D-serine, serine, threonine, leucine, isoleucine, alanine, valine, aminocyclopropane- carboxylic acid, aminocyclobutanecarboxylic acid, aminocyclopentanecarboxylic acid, aminocyclohexane-
  MOD_RES (2)..(2): carboxylic aminocyclohexanecarboxylic acid, aminocyclo- heptanecarboxylic acid, or aminocyclooctanecarboxylic acid
  MOD_RES (10)..(10): valine, tyrosine, phenylalanine, tryptophan, histidine, leucine, isoleucine, serine, threonine, aspartic acid, glutamic acid, alanine, lysine, arginine, cysteine, general formula 1, or general formula 2
  MOD_RES (12)..(12): serine, isoleucine, lysine, arginine, cysteine, general formula 1, or general formula 2
  MOD_RES (16)..(16): glycine, serine, histidine, glutamic acid, aspartic acid, glutamine, asparagine, lysine, arginine, homoglutamic acid, cysteine, homocysteine, or cysteic acid
  MOD_RES (20)..(20): lysine, arginine, aspartic acid, glutamic acid, glutamine, histidine, 2-methylalanine, cysteine, general formula 1, or general formula 2
  MOD_RES (28)..(28): lysine, arginine, aspartic acid, glutamic acid, alanine, asparagine, cysteine, general formula 1, or general formula 2
  MOD_RES (29)..(29): glycine, glutamine, threonine, serine, lysine, arginine, cysteine, general formula 1, or general formula 2
  MOD_RES (30)..(30): arginine, lysine, glycine, histidine, cysteine, general formula 1, or general formula 2
  MOD_RES (31)..(39): P31 to Xaa39 are repeated for 0 or 1 time
  MOD_RES (32)..(32): serine, lysine, cysteine, deletion, general formula 1, or general formula 2
  MOD_RES (33)..(33): serine, lysine, cysteine, general formula 1, general formula 2, or absent
  MOD_RES (39)..(39): serine, serine-NH2, cysteine, cysteine-NH2, lysine, lysine-NH2, or absent, or is a linking or spacer group + XE40, wherein XE40 is a lysine, cysteine, general formula 3, or general formula 4
XXEGTFTSDXSXYLEXQAAXEFIAWLVXXXPXXGCPPPX

SEQ ID NO: 326 - protein, 39 aa, Unknown
  Description of Unknown: GLP-1 receptor binding polypeptide
  MOD_RES (1)..(1): histidine, D-histidine, deamino-histidine, Beta-hydroxyl-histidine, homohistidine, alpha-fluoromethyl- histidine, alpha-methyl-histidine, N-methyl-histidine, Nalpha-acetyl-histidine,
  MOD_RES (1)..(1): alpha-methyl-histidine, 2-pyridinyl-alanine, 3-pyridinyl- alanine, 4-pyridinyl-alanine, imidazopropionyl
  MOD_RES (2)..(2): 2-methylalanine (Aib), glycine, D-serine, serine, threonine, leucine, isoleucine, alanine, valine, aminocyclopropane- carboxylic acid, aminocyclobutanecarboxylic acid, aminocyclopentanecarboxylic acid, aminocyclohexane-
  MOD_RES (2)..(2): carboxylic aminocyclohexanecarboxylic acid, aminocyclo- heptanecarboxylic acid, or aminocyclooctanecarboxylic acid
  MOD_RES (10)..(10): valine, tyrosine, phenylalanine, tryptophan, histidine, leucine, isoleucine, serine, threonine, aspartic acid, glutamic acid, alanine, lysine, arginine, cysteine, general formula 1, or general formula 2
  MOD_RES (12)..(12): serine, isoleucine, lysine, arginine, cysteine, general formula 1, or general formula 2
  MOD_RES (16)..(16): glycine, serine, histidine, glutamic acid, aspartic acid, glutamine, asparagine, lysine, arginine, homoglutamic acid, cysteine, homocysteine, or cysteic acid
  MOD_RES (20)..(20): lysine, arginine, aspartic acid, glutamic acid, glutamine, histidine, 2-methylalanine, cysteine, general formula 1, or general formula 2
  MOD_RES (28)..(28): lysine, arginine, aspartic acid, glutamic acid, alanine, asparagine, cysteine, general formula 1, or general formula 2
  MOD_RES (29)..(29): glycine, glutamine, threonine, serine, lysine, arginine, cysteine, general formula 1, or general formula 2
  MOD_RES (30)..(30): arginine, lysine, glycine, histidine, cysteine, general formula 1, or general formula 2
  MOD_RES (31)..(39): P31 to Xaa39 are repeated for 0 or 1 time
  MOD_RES (32)..(32): serine, lysine, cysteine, deletion, general formula 1, or general formula 2
  MOD_RES (35)..(35): alanine, lysine, cysteine, general formula 1, general formula 2, or absent
  MOD_RES (39)..(39): serine, serine-NH2, cysteine, cysteine-NH2, lysine, lysine-NH2, or absent, or is a linking or spacer group + XE40, wherein XE40 is a lysine, cysteine, general formula 3, or general formula 4
XXEGTFTSDXSXYLEXQAAXEFIAWLVXXXPXCGXPPPX

SEQ ID NO: 327 - protein, 39 aa, Unknown
  Description of Unknown: GLP-1 receptor binding polypeptide
  MOD_RES (1)..(1): histidine, D-histidine, deamino-histidine, Beta-hydroxyl-histidine, homohistidine, alpha-fluoromethyl- histidine, alpha-methyl-histidine, N-methyl-histidine, Nalpha-acetyl-histidine,
  MOD_RES (1)..(1): alpha-methyl-histidine, 2-pyridinyl-alanine, 3-pyridinyl- alanine, 4-pyridinyl-alanine, imidazopropionyl
  MOD_RES (2)..(2): 2-methylalanine (Aib), glycine, D-serine, serine, threonine, leucine, isoleucine, alanine, valine, aminocyclopropane- carboxylic acid, aminocyclobutanecarboxylic acid, aminocyclopentanecarboxylic acid, aminocyclohexane-
  MOD_RES (2)..(2): carboxylic aminocyclohexanecarboxylic acid, aminocyclo- heptanecarboxylic acid, or aminocyclooctanecarboxylic acid
  MOD_RES (10)..(10): valine, tyrosine, phenylalanine, tryptophan, histidine, leucine, isoleucine, serine, threonine, aspartic acid, glutamic acid, alanine, lysine, arginine, cysteine, general formula 1, or general formula 2
  MOD_RES (12)..(12): serine, isoleucine, lysine, arginine, cysteine, general formula 1, or general formula 2
  MOD_RES (16)..(16): glycine, serine, histidine, glutamic acid, aspartic acid, glutamine, asparagine, lysine, arginine, homoglutamic acid, cysteine, homocysteine, or cysteic acid
  MOD_RES (20)..(20): lysine, arginine, aspartic acid, glutamic acid, glutamine, histidine, 2-methylalanine, cysteine, general formula 1, or general formula 2
  MOD_RES (28)..(28): lysine, arginine, aspartic acid, glutamic acid, alanine, asparagine, cysteine, general formula 1, or general formula 2
  MOD_RES (29)..(29): glycine, glutamine, threonine, serine, lysine, arginine, cysteine, general formula 1, or general formula 2
  MOD_RES (30)..(30): arginine, lysine, glycine, histidine, cysteine, general formula 1, or general formula 2
  MOD_RES (31)..(39): P31 to Xaa39 are repeated for 0 or 1 time
  MOD_RES (33)..(33): serine, lysine, cysteine, general formula 1, general formula 2, or absent
  MOD_RES (35)..(35): alanine, lysine, cysteine, general formula 1, general formula 2, or absent
  MOD_RES (39)..(39): serine, serine-NH2, cysteine, cysteine-NH2, lysine, lysine-NH2, or absent, or is a linking or spacer group + XE40, wherein XE40 is a lysine, cysteine, general formula 3, or general formula 4
XXEGTFTSDXSXYLEXQAAXEFIAWLVXXXPCXGXPPPX

SEQ ID NO: 328 - protein, 31 aa, Unknown
  Description of Unknown: GLP-1 receptor binding polypeptide
  MOD_RES (1)..(1): histidine, D-histidine, deamino-histidine, Beta-hydroxyl-histidine, homohistidine, alpha-fluoromethyl- histidine, alpha-methyl-histidine, N-methyl-histidine, Nalpha-acetyl-histidine,
  MOD_RES (1)..(1): alpha-methyl-histidine, 2-pyridinyl-alanine, 3-pyridinyl- alanine, 4-pyridinyl-alanine, imidazopropionyl
  MOD_RES (2)..(2): 2-methylalanine (Aib), glycine, D-serine, serine, threonine, leucine, isoleucine, alanine, valine, aminocyclopropane- carboxylic acid, aminocyclobutanecarboxylic acid, aminocyclopentanecarboxylic acid, aminocyclohexane-
  MOD_RES (2)..(2): carboxylic aminocyclohexanecarboxylic acid, aminocyclo- heptanecarboxylic acid, or aminocyclooctanecarboxylic acid
  MOD_RES (10)..(10): valine, tyrosine, phenylalanine, tryptophan, histidine, leucine, isoleucine, serine, threonine, aspartic acid, glutamic acid, alanine, lysine, arginine, cysteine, general formula 1, or general formula 2
  MOD_RES (12)..(12): serine, isoleucine, lysine, arginine, cysteine, general formula 1, or general formula 2
  MOD_RES (16)..(16): glycine, serine, histidine, glutamic acid, aspartic acid, glutamine, asparagine, lysine, arginine, homoglutamic acid, cysteine, homocysteine, or cysteic acid
  MOD_RES (20)..(20): lysine, arginine, aspartic acid, glutamic acid, glutamine, histidine, 2-methylalanine, cysteine, general formula 1, or general formula 2
  MOD_RES (28)..(28): lysine, arginine, aspartic acid, glutamic acid, alanine, asparagine, cysteine, general formula 1, or general formula 2
  MOD_RES (29)..(29): glycine, glutamine, threonine, serine, lysine, arginine, cysteine, general formula 1, or general formula 2
  MOD_RES (30)..(30): arginine, lysine, glycine, histidine, cysteine, general formula 1, or general formula 2
XXEGTFTSDXSXYLEXQAAXEFIAWLVXXXC

SEQ ID NO: 329 - protein, 30 aa, Unknown
  Description of Unknown: GLP-1 receptor binding polypeptide
  MOD_RES (1)..(1): histidine, D-histidine, deamino-histidine, Beta-hydroxyl-histidine, homohistidine, alpha-fluoromethyl- histidine, alpha-methyl-histidine, N-methyl-histidine, Nalpha-acetyl-histidine,
  MOD_RES (1)..(1): alpha-methyl-histidine, 2-pyridinyl-alanine, 3-pyridinyl- alanine, 4-pyridinyl-alanine, imidazopropionyl
  MOD_RES (2)..(2): 2-methylalanine (Aib), glycine, D-serine, serine, threonine, leucine, isoleucine, alanine, valine, aminocyclopropane- carboxylic acid, aminocyclobutanecarboxylic acid, aminocyclopentanecarboxylic acid, aminocyclohexane-
  MOD_RES (2)..(2): carboxylic aminocyclohexanecarboxylic acid, aminocyclo- heptanecarboxylic acid, or aminocyclooctanecarboxylic acid
  MOD_RES (10)..(10): valine, tyrosine, phenylalanine, tryptophan, histidine, leucine, isoleucine, serine, threonine, aspartic acid, glutamic acid, alanine, lysine, arginine, cysteine, general formula 1, or general formula 2
  MOD_RES (12)..(12): serine, isoleucine, lysine, arginine, cysteine, general formula 1, or general formula 2
  MOD_RES (16)..(16): glycine, serine, histidine, glutamic acid, aspartic acid, glutamine, asparagine, lysine, arginine, homoglutamic acid, cysteine, homocysteine, or cysteic acid
  MOD_RES (20)..(20): lysine, arginine, aspartic acid, glutamic acid, glutamine, histidine, 2-methylalanine, cysteine, general formula 1, or general formula 2
  MOD_RES (28)..(28): lysine, arginine, aspartic acid, glutamic acid, alanine, asparagine, cysteine, general formula 1, or general formula 2
  MOD_RES (29)..(29): glycine, glutamine, threonine, serine, lysine, arginine, cysteine, general formula 1, or general formula 2
XXEGTFTSDXSXYLEXQAAXEFIAWLVXXC

SEQ ID NO: 330 - protein, 31 aa, Unknown
  Description of Unknown: GLP-1 receptor binding polypeptide
  MOD_RES (1)..(1): histidine, D-histidine, deamino-histidine, Beta-hydroxyl-histidine, homohistidine, alpha-fluoromethyl- histidine, alpha-methyl-histidine, N-methyl-histidine, Nalpha-acetyl-histidine,
  MOD_RES (1)..(1): alpha-methyl-histidine, 2-pyridinyl-alanine, 3-pyridinyl- alanine, 4-pyridinyl-alanine, imidazopropionyl
  MOD_RES (2)..(2): 2-methylalanine (Aib), glycine, D-serine, serine, threonine, leucine, isoleucine, alanine, valine, aminocyclopropane- carboxylic acid, aminocyclobutanecarboxylic acid, aminocyclopentanecarboxylic acid, aminocyclohexane-
  MOD_RES (2)..(2): carboxylic aminocycloheptanecarboxylic acid, or aminocyclooctanecarboxylic acid
  MOD_RES (10)..(10): valine, tyrosine, phenylalanine, tryptophan, histidine, leucine, isoleucine, serine, threonine, aspartic acid, glutamic acid, alanine, lysine, arginine, cysteine, general formula 1, or general formula 2
  MOD_RES (12)..(12): serine, isoleucine, lysine, arginine, cysteine, general formula 1, or general formula 2
  MOD_RES (16)..(16): glycine, serine, histidine, glutamic acid, aspartic acid, glutamine, asparagine, lysine, arginine, homoglutamic acid, cysteine, homocysteine, or cysteic acid
  MOD_RES (20)..(20): lysine, arginine, aspartic acid, glutamic acid, glutamine, histidine, 2-methylalanine, cysteine, general formula 1, or general formula 2
  MOD_RES (28)..(28): lysine, arginine, aspartic acid, glutamic acid, alanine, asparagine, cysteine, general formula 1, or general formula 2
  MOD_RES (30)..(30): arginine, lysine, glycine, histidine, cysteine, general formula 1, or general formula 2
  MOD_RES (31)..(31): -NH2, glycine, threonine, serine, aspartic acid, glutamic acid, tryptophan, tyrosine, phenylalanine, histidine, arginine, lysine, cysteine, a linking or spacer group, general formula 3, general formula 4 or a linking or
  MOD_RES (31)..(31): spacer group +XG32,
XXEGTFTSDXSXYLEXQAAXEFIAWLVXCXX

SEQ ID NO: 331 - protein, 31 aa, Unknown
  Description of Unknown: GLP-1 receptor binding polypeptide
  MOD_RES (1)..(1): histidine, D-histidine, deamino-histidine, Beta-hydroxyl-histidine, homohistidine, alpha-fluoromethyl- histidine, alpha-methyl-histidine, N-methyl-histidine, Nalpha-acetyl-histidine,
  MOD_RES (1)..(1): alpha-methyl-histidine, 2-pyridinyl-alanine, 3-pyridinyl- alanine, 4-pyridinyl-alanine, imidazopropionyl
  MOD_RES (2)..(2): 2-methylalanine (Aib), glycine, D-serine, serine, threonine, leucine, isoleucine, alanine, valine, aminocyclopropane- carboxylic acid, aminocyclobutanecarboxylic acid, aminocyclopentanecarboxylic acid, aminocyclohexane-
  MOD_RES (2)..(2): carboxylic aminocycloheptanecarboxylic acid, or aminocyclooctanecarboxylic acid
  MOD_RES (10)..(10): valine, tyrosine, phenylalanine, tryptophan, histidine, leucine, isoleucine, serine, threonine, aspartic acid, glutamic acid, alanine, lysine, arginine, cysteine, general formula 1, or general formula 2
  MOD_RES (12)..(12): serine, isoleucine, lysine, arginine, cysteine, general formula 1, or general formula 2
  MOD_RES (16)..(16): glycine, serine, histidine, glutamic acid, aspartic acid, glutamine, asparagine, lysine, arginine, homoglutamic acid, cysteine, homocysteine, or cysteic acid
  MOD_RES (20)..(20): lysine, arginine, aspartic acid, glutamic acid, glutamine, histidine, 2-methylalanine, cysteine, general formula 1, or general formula 2
  MOD_RES (29)..(29): glycine, glutamine, threonine, serine, lysine, arginine, cysteine, general formula 1, or general formula 2
  MOD_RES (30)..(30): arginine, lysine, glycine, histidine, cysteine, general formula 1, or general formula 2
  MOD_RES (31)..(31): -NH2, glycine, threonine, serine, aspartic acid, glutamic acid, tryptophan, tyrosine, phenylalanine, histidine, arginine, lysine, cysteine, a linking or spacer group, general formula 3, general formula 4 or a linking or
  MOD_RES (31)..(31): spacer group +XG32
XXEGTFTSDXSXYLEXQAAXEFIAWLVCXXX

SEQ ID NO: 332 - protein, 31 aa, Unknown
  Description of Unknown: GLP-1 receptor binding polypeptide
  MOD_RES (1)..(1): histidine, D-histidine, deamino-histidine, Beta-hydroxyl-histidine, homohistidine, alpha-fluoromethyl- histidine, alpha-methyl-histidine, N-methyl-histidine, Nalpha-acetyl-histidine,
  MOD_RES (1)..(1): alpha-methyl-histidine, 2-pyridinyl-alanine, 3-pyridinyl- alanine, 4-pyridinyl-alanine, imidazopropionyl
  MOD_RES (2)..(2): 2-methylalanine (Aib), glycine, D-serine, serine, threonine, leucine, isoleucine, alanine, valine, aminocyclopropane- carboxylic acid, aminocyclobutanecarboxylic acid, aminocyclopentanecarboxylic acid, aminocyclohexane-
  MOD_RES (2)..(2): carboxylic aminocycloheptanecarboxylic acid, or aminocyclooctanecarboxylic acid
  MOD_RES (10)..(10): valine, tyrosine, phenylalanine, tryptophan, histidine, leucine, isoleucine, serine, threonine, aspartic acid, glutamic acid, alanine, lysine, arginine, cysteine, general formula 1, or general formula 2
  MOD_RES (12)..(12): serine, isoleucine, lysine, arginine, cysteine, general formula 1, or general formula 2
  MOD_RES (16)..(16): glycine, serine, histidine, glutamic acid, aspartic acid, glutamine, asparagine, lysine, arginine, homoglutamic acid, cysteine, homocysteine, or cysteic acid
  MOD_RES (20)..(20): lysine, arginine, aspartic acid, glutamic acid, glutamine, histidine, 2-methylalanine, cysteine, general formula 1, or general formula 2
  MOD_RES (28)..(28): lysine, arginine, aspartic acid, glutamic acid, alanine, asparagine, cysteine, general formula 1, or general formula 2
  MOD_RES (29)..(29): glycine, glutamine, threonine, serine, lysine, arginine, cysteine, general formula 1, or general formula 2
  MOD_RES (30)..(30): arginine, lysine, glycine, histidine, cysteine, general formula 1, or general formula 2
  MOD_RES (31)..(31): -NH2, glycine, threonine, serine, aspartic acid, glutamic acid, tryptophan, tyrosine, phenylalanine, histidine, arginine, lysine, cysteine, a linking or spacer group, general formula 3, general formula 4 or a linking or
  MOD_RES (31)..(31): spacer group +XG32
XXEGTFTSDXSXYLEXQAAXEFIACLVXXXX

SEQ ID NO: 333 - protein, 31 aa, Unknown
  Description of Unknown: GLP-1 receptor binding polypeptide
  MOD_RES (1)..(1): histidine, D-histidine, deamino-histidine, Beta-hydroxyl-histidine, homohistidine, alpha-fluoromethyl- histidine, alpha-methyl-histidine, N-methyl-histidine, Nalpha-acetyl-histidine,
  MOD_RES (1)..(1): alpha-methyl-histidine, 2-pyridinyl-alanine, 3-pyridinyl- alanine, 4-pyridinyl-alanine, imidazopropionyl
  MOD_RES (2)..(2): 2-methylalanine (Aib), glycine, D-serine, serine, threonine, leucine, isoleucine, alanine, valine, aminocyclopropane- carboxylic acid, aminocyclobutanecarboxylic acid, aminocyclopentanecarboxylic acid, aminocyclohexane-
  MOD_RES (2)..(2): carboxylic aminocycloheptanecarboxylic acid, or aminocyclooctanecarboxylic acid
  MOD_RES (10)..(10): valine, tyrosine, phenylalanine, tryptophan, histidine, leucine, isoleucine, serine, threonine, aspartic acid, glutamic acid, alanine, lysine, arginine, cysteine, general formula 1, or general formula 2
  MOD_RES (12)..(12): serine, isoleucine, lysine, arginine, cysteine, general formula 1, or general formula 2
  MOD_RES (16)..(16): glycine, serine, histidine, glutamic acid, aspartic acid, glutamine, asparagine, lysine, arginine, homoglutamic acid, cysteine, homocysteine, or cysteic acid
  MOD_RES (28)..(28): lysine, arginine, aspartic acid, glutamic acid, alanine, asparagine, cysteine, general formula 1, or general formula 2
  MOD_RES (29)..(29): glycine, glutamine, threonine, serine, lysine, arginine, cysteine, general formula 1, or general formula 2
  MOD_RES (30)..(30): arginine, lysine, glycine, histidine, cysteine, general formula 1, or general formula 2
  MOD_RES (31)..(31): -NH2, glycine, threonine, serine, aspartic acid, glutamic acid, tryptophan, tyrosine, phenylalanine, histidine, arginine, lysine, cysteine, a linking or spacer group, general formula 3, general formula 4 or a linking or
  MOD_RES (31)..(31): spacer group +XG32
XXEGTFTSDXSXYLEXQAACEFIAWLVXXXX

SEQ ID NO: 334 - protein, 31 aa, Unknown
  Description of Unknown: GLP-1 receptor binding polypeptide
  MOD_RES (1)..(1): histidine, D-histidine, deamino-histidine, Beta-hydroxyl-histidine, homohistidine, alpha-fluoromethyl- histidine, alpha-methyl-histidine, N-methyl-histidine, Nalpha-acetyl-histidine,
  MOD_RES (1)..(1): alpha-methyl-histidine, 2-pyridinyl-alanine, 3-pyridinyl- alanine, 4-pyridinyl-alanine, imidazopropionyl
  MOD_RES (2)..(2): 2-methylalanine (Aib), glycine, D-serine, serine, threonine, leucine, isoleucine, alanine, valine, aminocyclopropane- carboxylic acid, aminocyclobutanecarboxylic acid, aminocyclopentanecarboxylic acid, aminocyclohexane-
  MOD_RES (2)..(2): carboxylic aminocycloheptanecarboxylic acid, or aminocyclooctanecarboxylic acid
  MOD_RES (10)..(10): valine, tyrosine, phenylalanine, tryptophan, histidine, leucine, isoleucine, serine, threonine, aspartic acid, glutamic acid, alanine, lysine, arginine, cysteine, general formula 1, or general formula 2
  MOD_RES (16)..(16): glycine, serine, histidine, glutamic acid, aspartic acid, glutamine, asparagine, lysine, arginine, homoglutamic acid, cysteine, homocysteine, or cysteic acid
  MOD_RES (20)..(20): lysine, arginine, aspartic acid, glutamic acid, glutamine, histidine, 2-methylalanine, cysteine, general formula 1, or general formula 2
  MOD_RES (28)..(28): lysine, arginine, aspartic acid, glutamic acid, alanine, asparagine, cysteine, general formula 1, or general formula 2
  MOD_RES (29)..(29): glycine, glutamine, threonine, serine, lysine, arginine, cysteine, general formula 1, or general formula 2
  MOD_RES (30)..(30): arginine, lysine, glycine, histidine, cysteine, general formula 1, or general formula 2
  MOD_RES (31)..(31): -NH2, glycine, threonine, serine, aspartic acid, glutamic acid, tryptophan, tyrosine, phenylalanine, histidine, arginine, lysine, cysteine, a linking or spacer group, general formula 3, general formula 4 or a linking or
  MOD_RES (31)..(31): spacer group +XG32
XXEGTFTSDXSCYLEXQAAXEFIAWLVXXXX

SEQ ID NO: 335 - protein, 31 aa, Unknown
  Description of Unknown: GLP-1 receptor binding polypeptide
  MOD_RES (1)..(1): histidine, D-histidine, deamino-histidine, Beta-hydroxyl-histidine, homohistidine, alpha-fluoromethyl- histidine, alpha-methyl-histidine, N-methyl-histidine, Nalpha-acetyl-histidine,
  MOD_RES (1)..(1): alpha-methyl-histidine, 2-pyridinyl-alanine, 3-pyridinyl- alanine, 4-pyridinyl-alanine, imidazopropionyl
  MOD_RES (2)..(2): 2-methylalanine (Aib), glycine, D-serine, serine, threonine, leucine, isoleucine, alanine, valine, aminocyclopropane- carboxylic acid, aminocyclobutanecarboxylic acid, aminocyclopentanecarboxylic acid, aminocyclohexane-
  MOD_RES (2)..(2): carboxylic aminocycloheptanecarboxylic acid, or aminocyclooctanecarboxylic acid
  MOD_RES (12)..(12): serine, isoleucine, lysine, arginine, cysteine, general formula 1, or general formula 2
  MOD_RES (16)..(16): glycine, serine, histidine, glutamic acid, aspartic acid, glutamine, asparagine, lysine, arginine, homoglutamic acid, cysteine, homocysteine, or cysteic acid
  MOD_RES (20)..(20): lysine, arginine, aspartic acid, glutamic acid, glutamine, histidine, 2-methylalanine, cysteine, general formula 1, or general formula 2
  MOD_RES (28)..(28): lysine, arginine, aspartic acid, glutamic acid, alanine, asparagine, cysteine, general formula 1, or general formula 2
  MOD_RES (29)..(29): glycine, glutamine, threonine, serine, lysine, arginine, cysteine, general formula 1, or general formula 2
  MOD_RES (30)..(30): arginine, lysine, glycine, histidine, cysteine, general formula 1, or general formula 2
  MOD_RES (31)..(31): -NH2, glycine, threonine, serine, aspartic acid, glutamic acid, tryptophan, tyrosine, phenylalanine, histidine, arginine, lysine, cysteine, a linking or spacer group, general formula 3, general formula 4 or a linking or
  MOD_RES (31)..(31): spacer group +XG32
XXEGTFTSDCSXYLEXQAAXEFIAWLVXXXX

SEQ ID NO: 336 - protein, 39 aa, Unknown
  Description of Unknown: GLP-1 receptor binding polypeptide
  MOD_RES (2)..(2): 2-methylalanine (Aib), glycine, D-serine, serine, threonine, leucine, isoleucine, alanine, valine, aminocyclopropane- carboxylic acid, aminocyclobutanecarboxylic acid, aminocyclopentanecarboxylic acid, aminocyclohexane-
  MOD_RES (2)..(2): carboxylic aminocycloheptanecarboxylic acid, or aminocyclooctanecarboxylic acid
  MOD_RES (16)..(16): glycine, serine, histidine, glutamic acid, aspartic acid, glutamine, asparagine, lysine, arginine, homoglutamic acid, cysteine, homocysteine, or cysteic acid
HXEGTFTSDVSSYLEXQAAKEFIAWLVKGRPSSGAPPPC

SEQ ID NO: 337 - protein, 39 aa, Unknown
  Description of Unknown: GLP-1 receptor binding polypeptide
  MOD_RES (2)..(2): 2-methylalanine (Aib), glycine, D-serine, serine, threonine, leucine, isoleucine, alanine, valine, aminocyclopropane- carboxylic acid, aminocyclobutanecarboxylic acid, aminocyclopentanecarboxylic acid, aminocyclohexane-
  MOD_RES (2)..(2): carboxylic aminocycloheptanecarboxylic acid, or aminocyclooctanecarboxylic acid
  MOD_RES (16)..(16): glycine, serine, histidine, glutamic acid, aspartic acid, glutamine, asparagine, lysine, arginine, homoglutamic acid, cysteine, homocysteine, or cysteic acid
HXEGTFTSDVSSYLEXQAAKEFIAWLVKGRPSSGCPPPS

SEQ ID NO: 338 - protein, 39 aa, Unknown
  Description of Unknown: GLP-1 receptor binding polypeptide
  MOD_RES (2)..(2): 2-methylalanine (Aib), glycine, D-serine, serine, threonine, leucine, isoleucine, alanine, valine, aminocyclopropane- carboxylic acid, aminocyclobutanecarboxylic acid, aminocyclopentanecarboxylic acid, aminocyclohexane-
  MOD_RES (2)..(2): carboxylic aminocycloheptanecarboxylic acid, or aminocyclooctanecarboxylic acid
  MOD_RES (16)..(16): glycine, serine, histidine, glutamic acid, aspartic acid, glutamine, asparagine, lysine, arginine, homoglutamic acid, cysteine, homocysteine, or cysteic acid
HXEGTFTSDVSSYLEXQAAKEFIAWLVKGRPSCGAPPPS

SEQ ID NO: 339 - protein, 39 aa, Unknown
  Description of Unknown: GLP-1 receptor binding polypeptide
  MOD_RES (2)..(2): 2-methylalanine (Aib), glycine, D-serine, serine, threonine, leucine, isoleucine, alanine, valine, aminocyclopropane- carboxylic acid, aminocyclobutanecarboxylic acid, aminocyclopentanecarboxylic acid, aminocyclohexane-
  MOD_RES (2)..(2): carboxylic aminocycloheptanecarboxylic acid, or aminocyclooctanecarboxylic acid
  MOD_RES (16)..(16): glycine, serine, histidine, glutamic acid, aspartic acid, glutamine, asparagine, lysine, arginine, homoglutamic acid, cysteine, homocysteine, or cysteic acid
HXEGTFTSDVSSYLEXQAAKEFIAWLVKGRPCSGAPPPS

SEQ ID NO: 340 - protein, 31 aa, Unknown
  Description of Unknown: GLP-1 receptor binding polypeptide
  MOD_RES (2)..(2): 2-methylalanine (Aib), glycine, D-serine, serine, threonine, leucine, isoleucine, alanine, valine, aminocyclopropane- carboxylic acid, aminocyclobutanecarboxylic acid, aminocyclopentanecarboxylic acid, aminocyclohexane-
  MOD_RES (2)..(2): carboxylic aminocycloheptanecarboxylic acid, or aminocyclooctanecarboxylic acid
  MOD_RES (16)..(16): glycine, serine, histidine, glutamic acid, aspartic acid, glutamine, asparagine, lysine, arginine, homoglutamic acid, cysteine, homocysteine, or cysteic acid
HXEGTFTSDVSSYLEXQAAKEFIAWLVKGRC

SEQ ID NO: 341 - protein, 30 aa, Artificial Sequence
  Description of Artificial Sequence: Synthetic GLP-1 receptor binding polypeptide
  MOD_RES (2)..(2): 2-methylalanine (Aib), glycine, D-serine, serine, threonine, leucine, isoleucine, alanine, valine, aminocyclopropane- carboxylic acid, aminocyclobutanecarboxylic acid, aminocyclopentanecarboxylic acid, aminocyclohexane-
  MOD_RES (2)..(2): carboxylic aminocycloheptanecarboxylic acid, or aminocyclooctanecarboxylic acid
  MOD_RES (16)..(16): glycine, serine, histidine, glutamic acid, aspartic acid, glutamine, asparagine, lysine, arginine, homoglutamic acid, cysteine, homocysteine, or cysteic acid
HXEGTFTSDVSSYLEXQAAKEFIAWLVKGC

SEQ ID NO: 342 - protein, 31 aa, Unknown
  Description of Unknown: GLP-1 receptor binding polypeptide
  MOD_RES (2)..(2): 2-methylalanine (Aib), glycine, D-serine, serine, threonine, leucine, isoleucine, alanine, valine, aminocyclopropane- carboxylic acid, aminocyclobutanecarboxylic acid, aminocyclopentanecarboxylic acid, aminocyclohexane-
  MOD_RES (2)..(2): carboxylic aminocycloheptanecarboxylic acid, or aminocyclooctanecarboxylic acid
  MOD_RES (16)..(16): glycine, serine, histidine, glutamic acid, aspartic acid, glutamine, asparagine, lysine, arginine, homoglutamic acid, cysteine, homocysteine, or cysteic acid
HXEGTFTSDVSSYLEXQAAKEFIAWLVKCRG

SEQ ID NO: 343 - protein, 31 aa, Unknown
  Description of Unknown: GLP-1 receptor binding polypeptide
  MOD_RES (2)..(2): 2-methylalanine (Aib), glycine, D-serine, serine, threonine, leucine, isoleucine, alanine, valine, aminocyclopropane- carboxylic acid, aminocyclobutanecarboxylic acid, aminocyclopentanecarboxylic acid, aminocyclohexane-
  MOD_RES (2)..(2): carboxylic aminocycloheptanecarboxylic acid, or aminocyclooctanecarboxylic acid
  MOD_RES (16)..(16): glycine, serine, histidine, glutamic acid, aspartic acid, glutamine, asparagine, lysine, arginine, homoglutamic acid, cysteine, homocysteine, or cysteic acid
HXEGTFTSDVSSYLEXQAAKEFIAWLVCGRG

SEQ ID NO: 344 - protein, 30 aa, Unknown
  Description of Unknown: GLP-1 receptor binding polypeptide
  MOD_RES (2)..(2): 2-methylalanine (Aib), glycine, D-serine, serine, threonine, leucine, isoleucine, alanine, valine, aminocyclopropane- carboxylic acid, aminocyclobutanecarboxylic acid, aminocyclopentanecarboxylic acid, aminocyclohexane-
  MOD_RES (2)..(2): carboxylic aminocycloheptanecarboxylic acid, or aminocyclooctanecarboxylic acid
  MOD_RES (16)..(16): glycine, serine, histidine, glutamic acid, aspartic acid, glutamine, asparagine, lysine, arginine, homoglutamic acid, cysteine, homocysteine, or cysteic acid
HXEGTFTSDVSSYLEXQAAKEFIAWLVCGR

SEQ ID NO: 345 - protein, 31 aa, Unknown
  Description of Unknown: GLP-1 receptor binding polypeptide
  MOD_RES (2)..(2): 2-methylalanine (Aib), glycine, D-serine, serine, threonine, leucine, isoleucine, alanine, valine, aminocyclopropane- carboxylic acid, aminocyclobutanecarboxylic acid, aminocyclopentanecarboxylic acid, aminocyclohexane-
  MOD_RES (2)..(2): carboxylic aminocycloheptanecarboxylic acid, or aminocyclooctanecarboxylic acid
  MOD_RES (16)..(16): glycine, serine, histidine, glutamic acid, aspartic acid, glutamine, asparagine, lysine, arginine, homoglutamic acid, cysteine, homocysteine, or cysteic acid
HXEGTFTSDVSSYLEXQAAKEFIACLVKGRG

SEQ ID NO: 346 - protein, 31 aa, Unknown
  Description of Unknown: GLP-1 receptor binding polypeptide
  MOD_RES (2)..(2): 2-methylalanine (Aib), glycine, D-serine, serine, threonine, leucine, isoleucine, alanine, valine, aminocyclopropane- carboxylic acid, aminocyclobutanecarboxylic acid, aminocyclopentanecarboxylic acid, aminocyclohexane-
  MOD_RES (2)..(2): carboxylic aminocycloheptanecarboxylic acid, or aminocyclooctanecarboxylic acid
  MOD_RES (16)..(16): glycine, serine, histidine, glutamic acid, aspartic acid, glutamine, asparagine, lysine, arginine, homoglutamic acid, cysteine, homocysteine, or cysteic acid
HXEGTFTSDVSSYLEXQAACEFIAWLVKGRG

SEQ ID NO: 347 - protein, 30 aa, Unknown
  Description of Unknown: GLP-1 receptor binding polypeptide
  MOD_RES (2)..(2): 2-methylalanine (Aib), glycine, D-serine, serine, threonine, leucine, isoleucine, alanine, valine, aminocyclopropane- carboxylic acid, aminocyclobutanecarboxylic acid, aminocyclopentanecarboxylic acid, aminocyclohexane-
  MOD_RES (2)..(2): carboxylic aminocycloheptanecarboxylic acid, or aminocyclooctanecarboxylic acid
  MOD_RES (16)..(16): glycine, serine, histidine, glutamic acid, aspartic acid, glutamine, asparagine, lysine, arginine, homoglutamic acid, cysteine, homocysteine, or cysteic acid
HXEGTFTSDVSSYLEXQAACEFIAWLVKGR

SEQ ID NO: 348 - protein, 31 aa, Unknown
  Description of Unknown: GLP-1 receptor binding polypeptide
  MOD_RES (2)..(2): 2-methylalanine (Aib), glycine, D-serine, serine, threonine, leucine, isoleucine, alanine, valine, aminocyclopropane- carboxylic acid, aminocyclobutanecarboxylic acid, aminocyclopentanecarboxylic acid, aminocyclohexane-
  MOD_RES (2)..(2): carboxylic aminocycloheptanecarboxylic acid, or aminocyclooctanecarboxylic acid
  MOD_RES (16)..(16): glycine, serine, histidine, glutamic acid, aspartic acid, glutamine, asparagine, lysine, arginine, homoglutamic acid, cysteine, homocysteine, or cysteic acid
HXEGTFTSDVSCYLEXQAAKEFIAWLVKGRG

SEQ ID NO: 349 - protein, 31 aa, Unknown
  Description of Unknown: GLP-1 receptor binding polypeptide
  MOD_RES (2)..(2): 2-methylalanine (Aib), glycine, D-serine, serine, threonine, leucine, isoleucine, alanine, valine, aminocyclopropane- carboxylic acid, aminocyclobutanecarboxylic acid, aminocyclopentanecarboxylic acid, aminocyclohexane-
  MOD_RES (2)..(2): carboxylic aminocycloheptanecarboxylic acid, or aminocyclooctanecarboxylic acid
  MOD_RES (16)..(16): glycine, serine, histidine, glutamic acid, aspartic acid, glutamine, asparagine, lysine, arginine, homoglutamic acid, cysteine, homocysteine, or cysteic acid
HXEGTFTSDCSSYLEXQAAKEFIAWLVKGRG

SEQ ID NO: 350 - protein, 30 aa, Unknown
  Description of Unknown: GLP-1 receptor binding polypeptide
  MOD_RES (2)..(2): 2-methylalanine (Aib), glycine, D-serine, serine, threonine, leucine, isoleucine, alanine, valine, aminocyclopropane- carboxylic acid, aminocyclobutanecarboxylic acid, aminocyclopentanecarboxylic acid, aminocyclohexane-
  MOD_RES (2)..(2): carboxylic aminocycloheptanecarboxylic acid, or aminocyclooctanecarboxylic acid
  MOD_RES (16)..(16): glycine, serine, histidine, glutamic acid, aspartic acid, glutamine, asparagine, lysine, arginine, homoglutamic acid, cysteine, homocysteine, or cysteic acid
HXEGTFTSDCSSYLEXQAAKEFIAWLVKGR

SEQ ID NO: 351 - protein, 39 aa, Unknown
  Description of Unknown: GLP-1 receptor binding polypeptide
  MOD_RES (1)..(1): histidine, D-histidine, deamino-histidine, Beta-hydroxyl-histidine, homohistidine, alpha-fluoromethyl- histidine, alpha-methyl-histidine, N-methyl-histidine, Nalpha-acetyl-histidine,
  MOD_RES (1)..(1): alpha-methyl-histidine, 2-pyridinyl-alanine, 3-pyridinyl-alanine, 4-pyridinyl-alanine, imidazopropionyl
  MOD_RES (2)..(2): 2-methylalanine (Aib), glycine, D-serine, serine, threonine, leucine, isoleucine, alanine, valine, aminocyclopropane- carboxylic acid, aminocyclobutanecarboxylic acid, aminocyclopentanecarboxylic acid, aminocyclohexane-
  MOD_RES (2)..(2): carboxylic aminocycloheptanecarboxylic acid, or aminocyclooctanecarboxylic acid
  MOD_RES (10)..(10): valine, tyrosine, phenylalanine, tryptophan, histidine, leucine, isoleucine, serine, threonine, aspartic acid, glutamic acid, alanine, lysine, arginine, cysteine, general formula 1, or general formula 2
  MOD_RES (12)..(12): serine, isoleucine, lysine, arginine, cysteine, general formula 1, or general formula 2
  MOD_RES (16)..(16): glycine, serine, histidine, glutamic acid, aspartic acid, glutamine, asparagine, lysine, arginine, homoglutamic acid, cysteine, homocysteine, or cysteic acid
  MOD_RES (20)..(20): lysine, arginine, aspartic acid, glutamic acid, glutamine, histidine, 2-methylalanine, cysteine, general formula 1, or general formula 2
  MOD_RES (28)..(28): lysine, arginine, aspartic acid, glutamic acid, alanine, asparagine, cysteine, general formula 1, or general formula 2
  MOD_RES (29)..(29): glycine, glutamine, threonine, serine, lysine, arginine, cysteine, general formula 1, or general formula 2
  MOD_RES (30)..(30): arginine, lysine, glycine, histidine, cysteine, general formula 1, or general formula 2
  MOD_RES (31)..(39): P31 to K39 are repeated for 0 or 1 time
  MOD_RES (32)..(32): serine, lysine, cysteine, deletion, general formula 1, or general formula 2
  MOD_RES (33)..(33): serine, lysine, cysteine, general formula 1, general formula 2, or absent
  MOD_RES (35)..(35): alanine, lysine, cysteine, general formula 1, general formula 2, or absent
XXEGTFTSDXSXYLEXQAAXEFIAWLVXXXPXXGXPPPK

SEQ ID NO: 352 - protein, 39 aa, Unknown
  Description of Unknown: GLP-1 receptor binding polypeptide
  MOD_RES (1)..(1): histidine, D-histidine, deamino-histidine, Beta-hydroxyl-histidine, homohistidine, alpha-fluoromethyl- histidine, alpha-methyl-histidine, N-methyl-histidine, Nalpha-acetyl-histidine,
  MOD_RES (1)..(1): alpha-methyl-histidine, 2-pyridinyl-alanine, 3-pyridinyl-alanine, 4-pyridinyl-alanine, imidazopropionyl
  MOD_RES (2)..(2): 2-methylalanine (Aib), glycine, D-serine, serine, threonine, leucine, isoleucine, alanine, valine, aminocyclopropane- carboxylic acid, aminocyclobutanecarboxylic acid, aminocyclopentanecarboxylic acid, aminocyclohexane-
  MOD_RES (2)..(2): carboxylic aminocycloheptanecarboxylic acid, or aminocyclooctanecarboxylic acid
  MOD_RES (10)..(10): valine, tyrosine, phenylalanine, tryptophan, histidine, leucine, isoleucine, serine, threonine, aspartic acid, glutamic acid, alanine, lysine, arginine, cysteine, general formula 1, or general formula 2
  MOD_RES (12)..(12): serine, isoleucine, lysine, arginine, cysteine, general formula 1, or general formula 2
  MOD_RES (16)..(16): glycine, serine, histidine, glutamic acid, aspartic acid, glutamine, asparagine, lysine, arginine, homoglutamic acid, cysteine, homocysteine, or cysteic acid
  MOD_RES (20)..(20): lysine, arginine, aspartic acid, glutamic acid, glutamine, histidine, 2-methylalanine, cysteine, general formula 1, or general formula 2
  MOD_RES (28)..(28): lysine, arginine, aspartic acid, glutamic acid, alanine, asparagine, cysteine, general formula 1, or general formula 2
  MOD_RES (29)..(29): glycine, glutamine, threonine, serine, lysine, arginine, cysteine, general formula 1, or general formula 2
  MOD_RES (30)..(30): arginine, lysine, glycine, histidine, cysteine, general formula 1, or general formula 2
  MOD_RES (31)..(39): P31 to Xaa39 are repeated for 0 or 1 time
  MOD_RES (32)..(32): serine, lysine, cysteine, deletion, general formula 1, or general formula 2
  MOD_RES (33)..(33): serine, lysine, cysteine, general formula 1, general formula 2, or absent
  MOD_RES (39)..(39): serine, serine-NH2, cysteine, cysteine-NH2, lysine, lysine-NH2, or absent, or is a linking or spacer group + XE40, wherein XE40 is a lysine, cysteine, general formula 3, or general formula 4
XXEGTFTSDXSXYLEXQAAXEFIAWLVXXXPXXGKPPPX

SEQ ID NO: 353 - protein, 39 aa, Unknown
  Description of Unknown: GLP-1 receptor binding polypeptide
  MOD_RES (1)..(1): histidine, D-histidine, deamino-histidine, Beta-hydroxyl-histidine, homohistidine, alpha-fluoromethyl- histidine, alpha-methyl-histidine, N-methyl-histidine, Nalpha-acetyl-histidine,
  MOD_RES (1)..(1): alpha-methyl-histidine, 2-pyridinyl-alanine, 3-pyridinyl-alanine, 4-pyridinyl-alanine, imidazopropionyl
  MOD_RES (2)..(2): 2-methylalanine (Aib), glycine, D-serine, serine, threonine, leucine, isoleucine, alanine, valine, aminocyclopropane- carboxylic acid, aminocyclobutanecarboxylic acid, aminocyclopentanecarboxylic acid, aminocyclohexane-
  MOD_RES (2)..(2): carboxylic aminocycloheptanecarboxylic acid, or aminocyclooctanecarboxylic acid
  MOD_RES (10)..(10): valine, tyrosine, phenylalanine, tryptophan, histidine, leucine, isoleucine, serine, threonine, aspartic acid, glutamic acid, alanine, lysine, arginine, cysteine, general formula 1, or general formula 2
  MOD_RES (12)..(12): serine, isoleucine, lysine, arginine, cysteine, general formula 1, or general formula 2
  MOD_RES (16)..(16): glycine, serine, histidine, glutamic acid, aspartic acid, glutamine, asparagine, lysine, arginine, homoglutamic acid, cysteine, homocysteine, or cysteic acid
  MOD_RES (20)..(20): lysine, arginine, aspartic acid, glutamic acid, glutamine, histidine, 2-methylalanine, cysteine, general formula 1, or general formula 2
  MOD_RES (28)..(28): lysine, arginine, aspartic acid, glutamic acid, alanine, asparagine, cysteine, general formula 1, or general formula 2
  MOD_RES (29)..(29): glycine, glutamine, threonine, serine, lysine, arginine, cysteine, general formula 1, or general formula 2
  MOD_RES (30)..(30): arginine, lysine, glycine, histidine, cysteine, general formula 1, or general formula 2
  MOD_RES (31)..(39): P31 to Xaa39 are repeated for 0 or 1 time
  MOD_RES (32)..(32): serine, lysine, cysteine, deletion, general formula 1, or general formula 2
  MOD_RES (35)..(35): alanine, lysine, cysteine, general formula 1, general formula 2, or absent
  MOD_RES (39)..(39): serine, serine-NH2, cysteine, cysteine-NH2, lysine, lysine-NH2, or absent, or is a linking or spacer group + XE40, wherein XE40 is a lysine, cysteine, general formula 3, or general formula 4
XXEGTFTSDXSXYLEXQAAXEFIAWLVXXXPXKGXPPPX

SEQ ID NO: 354 - protein, 39 aa, Unknown
  Description of Unknown: GLP-1 receptor binding polypeptide
  MOD_RES (1)..(1): histidine, D-histidine, deamino-histidine, Beta-hydroxyl-histidine, homohistidine, alpha-fluoromethyl- histidine, alpha-methyl-histidine, N-methyl-histidine, Nalpha-acetyl-histidine,
  MOD_RES (1)..(1): alpha-methyl-histidine, 2-pyridinyl-alanine, 3-pyridinyl- alanine, 4-pyridinyl-alanine, imidazopropionyl
  MOD_RES (2)..(2): 2-methylalanine (Aib), glycine, D-serine, serine, threonine, leucine, isoleucine, alanine, valine, aminocyclopropane- carboxylic acid, aminocyclobutanecarboxylic acid, aminocyclopentanecarboxylic acid, aminocyclohexane-
  MOD_RES (2)..(2): carboxylic aminocycloheptanecarboxylic acid, or aminocyclooctanecarboxylic acid
  MOD_RES (10)..(10): valine, tyrosine, phenylalanine, tryptophan, histidine, leucine, isoleucine, serine, threonine, aspartic acid, glutamic acid, alanine, lysine, arginine, cysteine, general formula 1, or general formula 2
  MOD_RES (12)..(12): serine, isoleucine, lysine, arginine, cysteine, general formula 1, or general formula 2
  MOD_RES (16)..(16): glycine, serine, histidine, glutamic acid, aspartic acid, glutamine, asparagine, lysine, arginine, homoglutamic acid, cysteine, homocysteine, or cysteic acid
  MOD_RES (20)..(20): lysine, arginine, aspartic acid, glutamic acid, glutamine, histidine, 2-methylalanine, cysteine, general formula 1, or general formula 2
  MOD_RES (28)..(28): lysine, arginine, aspartic acid, glutamic acid, alanine, asparagine, cysteine, general formula 1, or general formula 2
  MOD_RES (29)..(29): glycine, glutamine, threonine, serine, lysine, arginine, cysteine, general formula 1, or general formula 2
  MOD_RES (30)..(30): arginine, lysine, glycine, histidine, cysteine, general formula 1, or general formula 2
  MOD_RES (31)..(39): P31 to Xaa39 are repeated for 0 or 1 time
  MOD_RES (33)..(33): serine, lysine, cysteine, general formula 1, general formula 2, or absent
  MOD_RES (35)..(35): alanine, lysine, cysteine, general formula 1, general formula 2, or absent
  MOD_RES (39)..(39): serine, serine-NH2, cysteine, cysteine-NH2, lysine, lysine-NH2, or absent, or is a linking or spacer group + XE40, wherein XE40 is a lysine, cysteine, general formula 3, or general formula 4
XXEGTFTSDXSXYLEXQAAXEFIAWLVXXXPKXGXPPPX

SEQ ID NO: 355 - protein, 31 aa, Unknown
  Description of Unknown: GLP-1 receptor binding polypeptide
  MOD_RES (1)..(1): histidine, D-histidine, deamino-histidine, Beta-hydroxyl-histidine, homohistidine, alpha-fluoromethyl- histidine, alpha-methyl-histidine, N-methyl-histidine, Nalpha-acetyl-histidine,
  MOD_RES (1)..(1): alpha-methyl-histidine, 2-pyridinyl-alanine, 3-pyridinyl- alanine, 4-pyridinyl-alanine, imidazopropionyl
  MOD_RES (2)..(2): 2-methylalanine (Aib), glycine, D-serine, serine, threonine, leucine, isoleucine, alanine, valine, aminocyclopropane- carboxylic acid, aminocyclobutanecarboxylic acid, aminocyclopentanecarboxylic acid, aminocyclohexane-
  MOD_RES (2)..(2): carboxylic aminocycloheptanecarboxylic acid, or aminocyclooctanecarboxylic acid
  MOD_RES (10)..(10): valine, tyrosine, phenylalanine, tryptophan, histidine, leucine, isoleucine, serine, threonine, aspartic acid, glutamic acid, alanine, lysine, arginine, cysteine, general formula 1, or general formula 2
  MOD_RES (12)..(12): serine, isoleucine, lysine, arginine, cysteine, general formula 1, or general formula 2
  MOD_RES (16)..(16): glycine, serine, histidine, glutamic acid, aspartic acid, glutamine, asparagine, lysine, arginine, homoglutamic acid, cysteine, homocysteine, or cysteic acid
  MOD_RES (20)..(20): lysine, arginine, aspartic acid, glutamic acid, glutamine, histidine, 2-methylalanine, cysteine, general formula 1, or general formula 2
  MOD_RES (28)..(28): lysine, arginine, aspartic acid, glutamic acid, alanine, asparagine, cysteine, general formula 1, or general formula 2
  MOD_RES (29)..(29): glycine, glutamine, threonine, serine, lysine, arginine, cysteine, general formula 1, or general formula 2
  MOD_RES (30)..(30): arginine, lysine, glycine, histidine, cysteine, general formula 1, or general formula 2
XXEGTFTSDXSXYLEXQAAXEFIAWLVXXXK

SEQ ID NO: 356 - protein, 30 aa, Unknown
  Description of Unknown: GLP-1 receptor binding polypeptide
  MOD_RES (1)..(1): histidine, D-histidine, deamino-histidine, Beta-hydroxyl-histidine, homohistidine, alpha-fluoromethyl- histidine, alpha-methyl-histidine, N-methyl-histidine, Nalpha-acetyl-histidine,
  MOD_RES (1)..(1): alpha-methyl-histidine, 2-pyridinyl-alanine, 3-pyridinyl- alanine, 4-pyridinyl-alanine, imidazopropionyl
  MOD_RES (2)..(2): 2-methylalanine (Aib), glycine, D-serine, serine, threonine, leucine, isoleucine, alanine, valine, aminocyclopropane- carboxylic acid, aminocyclobutanecarboxylic acid, aminocyclopentanecarboxylic acid, aminocyclohexane-
  MOD_RES (2)..(2): carboxylic aminocycloheptanecarboxylic acid, or aminocyclooctanecarboxylic acid
  MOD_RES (10)..(10): valine, tyrosine, phenylalanine, tryptophan, histidine, leucine, isoleucine, serine, threonine, aspartic acid, glutamic acid, alanine, lysine, arginine, cysteine, general formula 1, or general formula 2
  MOD_RES (12)..(12): serine, isoleucine, lysine, arginine, cysteine, general formula 1, or general formula 2
  MOD_RES (16)..(16): glycine, serine, histidine, glutamic acid, aspartic acid, glutamine, asparagine, lysine, arginine, homoglutamic acid, cysteine, homocysteine, or cysteic acid
  MOD_RES (20)..(20): lysine, arginine, aspartic acid, glutamic acid, glutamine, histidine, 2-methylalanine, cysteine, general formula 1, or general formula 2
  MOD_RES (28)..(28): lysine, arginine, aspartic acid, glutamic acid, alanine, asparagine, cysteine, general formula 1, or general formula 2
  MOD_RES (29)..(29): glycine, glutamine, threonine, serine, lysine, arginine, cysteine, general formula 1, or general formula 2
XXEGTFTSDXSXYLEXQAAXEFIAWLVXXK

SEQ ID NO: 357 - protein, 31 aa, Unknown
  Description of Unknown: GLP-1 receptor binding polypeptide
  MOD_RES (1)..(1): histidine, D-histidine, deamino-histidine, Beta-hydroxyl-histidine, homohistidine, alpha-fluoromethyl- histidine, alpha-methyl-histidine, N-methyl-histidine, Nalpha-acetyl-histidine,
  MOD_RES (1)..(1): alpha-methyl-histidine, 2-pyridinyl-alanine, 3-pyridinyl- alanine, 4-pyridinyl-alanine, imidazopropionyl
  MOD_RES (2)..(2): 2-methylalanine (Aib), glycine, D-serine, serine, threonine, leucine, isoleucine, alanine, valine, aminocyclopropane- carboxylic acid, aminocyclobutanecarboxylic acid, aminocyclopentanecarboxylic acid, aminocyclohexane-
  MOD_RES (2)..(2): carboxylic aminocycloheptanecarboxylic acid, or aminocyclooctanecarboxylic acid
  MOD_RES (10)..(10): valine, tyrosine, phenylalanine, tryptophan, histidine, leucine, isoleucine, serine, threonine, aspartic acid, glutamic acid, alanine, lysine, arginine, cysteine, general formula 1, or general formula 2
  MOD_RES (12)..(12): serine, isoleucine, lysine, arginine, cysteine, general formula 1, or general formula 2
  MOD_RES (16)..(16): glycine, serine, histidine, glutamic acid, aspartic acid, glutamine, asparagine, lysine, arginine, homoglutamic acid, cysteine, homocysteine, or cysteic acid
  MOD_RES (20)..(20): lysine, arginine, aspartic acid, glutamic acid, glutamine, histidine, 2-methylalanine, cysteine, general formula 1, or general formula 2
  MOD_RES (28)..(28): lysine, arginine, aspartic acid, glutamic acid, alanine, asparagine, cysteine, general formula 1, or general formula 2
  MOD_RES (30)..(30): arginine, lysine, glycine, histidine, cysteine, general formula 1, or general formula 2
  MOD_RES (31)..(31): -NH2, glycine, threonine, serine, aspartic acid, glutamic acid, tryptophan, tyrosine, phenylalanine, histidine, arginine, lysine, cysteine, a linking or spacer group, general formula 3, general formula 4 or a linking or
  MOD_RES (31)..(31): spacer group +XG32,
XXEGTFTSDXSXYLEXQAAXEFIAWLVXKXX

SEQ ID NO: 358 - protein, 31 aa, Unknown
  Description of Unknown: GLP-1 receptor binding polypeptide
  MOD_RES (1)..(1): histidine, D-histidine, deamino-histidine, Beta-hydroxyl-histidine, homohistidine, alpha-fluoromethyl- histidine, alpha-methyl-histidine, N-methyl-histidine, Nalpha-acetyl-histidine,
  MOD_RES (1)..(1): alpha-methyl-histidine, 2-pyridinyl-alanine, 3-pyridinyl- alanine, 4-pyridinyl-alanine, imidazopropionyl
  MOD_RES (2)..(2): 2-methylalanine (Aib), glycine, D-serine, serine, threonine, leucine, isoleucine, alanine, valine, aminocyclopropane- carboxylic acid, aminocyclobutanecarboxylic acid, aminocyclopentanecarboxylic acid, aminocyclohexane-
  MOD_RES (2)..(2): carboxylic aminocycloheptanecarboxylic acid, or aminocyclooctanecarboxylic acid
  MOD_RES (10)..(10): valine, tyrosine, phenylalanine, tryptophan, histidine, leucine, isoleucine, serine, threonine, aspartic acid, glutamic acid, alanine, lysine, arginine, cysteine, general formula 1, or general formula 2
  MOD_RES (12)..(12): serine, isoleucine, lysine, arginine, cysteine, general formula 1, or general formula 2
  MOD_RES (16)..(16): glycine, serine, histidine, glutamic acid, aspartic acid, glutamine, asparagine, lysine, arginine, homoglutamic acid, cysteine, homocysteine, or cysteic acid
  MOD_RES (20)..(20): lysine, arginine, aspartic acid, glutamic acid, glutamine, histidine, 2-methylalanine, cysteine, general formula 1, or general formula 2
  MOD_RES (29)..(29): glycine, glutamine, threonine, serine, lysine, arginine, cysteine, general formula 1, or general formula 2
  MOD_RES (30)..(30): arginine, lysine, glycine, histidine, cysteine, general formula 1, or general formula 2
  MOD_RES (31)..(31): -NH2, glycine, threonine, serine, aspartic acid, glutamic acid, tryptophan, tyrosine, phenylalanine, histidine, arginine, lysine, cysteine, a linking or spacer group, general formula 3, general formula 4 or a linking or
  MOD_RES (31)..(31): spacer group +XG32
XXEGTFTSDXSXYLEXQAAXEFIAWLVKXXX

SEQ ID NO: 359 - protein, 31 aa, Unknown
  Description of Unknown: GLP-1 receptor binding polypeptide
  MOD_RES (1)..(1): histidine, D-histidine, deamino-histidine, Beta-hydroxyl-histidine, homohistidine, alpha-fluoromethyl- histidine, alpha-methyl-histidine, N-methyl-histidine, Nalpha- acetyl- histidine, alpha-methyl-histidine, 2-pyridinyl-alanine,
  MOD_RES (1)..(1): 3-pyridinyl-alanine, 4-pyridinyl-alanine, imidazopropionyl
  MOD_RES (2)..(2): 2-methylalanine (Aib), glycine, D-serine, serine, threonine, leucine, isoleucine, alanine, valine, aminocyclopropane- carboxylic acid, aminocyclobutanecarboxylic acid, aminocyclopentanecarboxylic acid, aminocyclohexane-
  MOD_RES (2)..(2): carboxylic aminocycloheptanecarboxylic acid, or aminocyclooctanecarboxylic acid
  MOD_RES (10)..(10): valine, tyrosine, phenylalanine, tryptophan, histidine, leucine, isoleucine, serine, threonine, aspartic acid, glutamic acid, alanine, lysine, arginine, cysteine, general formula 1, or general formula 2
  MOD_RES (12)..(12): serine, isoleucine, lysine, arginine, cysteine, general formula 1, or general formula 2
  MOD_RES (16)..(16): glycine, serine, histidine, glutamic acid, aspartic acid, glutamine, asparagine, lysine, arginine, homoglutamic acid, cysteine, homocysteine, or cysteic acid
  MOD_RES (20)..(20): lysine, arginine, aspartic acid, glutamic acid, glutamine, histidine, 2-methylalanine, cysteine, general formula 1, or general formula 2
  MOD_RES (28)..(28): lysine, arginine, aspartic acid, glutamic acid, alanine, asparagine, cysteine, general formula 1, or general formula 2
  MOD_RES (29)..(29): glycine, glutamine, threonine, serine, lysine, arginine, cysteine, general formula 1, or general formula 2
  MOD_RES (30)..(30): arginine, lysine, glycine, histidine, cysteine, general formula 1, or general formula 2
  MOD_RES (31)..(31): -NH2, glycine, threonine, serine, aspartic acid, glutamic acid, tryptophan, tyrosine, phenylalanine, histidine, arginine, lysine, cysteine, a linking or spacer group, general formula 3, general formula 4 or a linking or
  MOD_RES (31)..(31): spacer group +XG32
XXEGTFTSDXSXYLEXQAAXEFIAKLVXXXX

SEQ ID NO: 360 - protein, 31 aa, Unknown
  Description of Unknown: GLP-1 receptor binding polypeptide
  MOD_RES (1)..(1): histidine, D-histidine, deamino-histidine, Beta-hydroxyl-histidine, homohistidine, alpha-fluoromethyl- histidine, alpha-methyl-histidine, N-methyl-histidine, Nalpha-acetyl-histidine,
  MOD_RES (1)..(1): alpha-methyl-histidine, 2-pyridinyl-alanine, 3-pyridinyl- alanine, 4-pyridinyl-alanine, imidazopropionyl
  MOD_RES (2)..(2): 2-methylalanine (Aib), glycine, D-serine, serine, threonine, leucine, isoleucine, alanine, valine, aminocyclopropane- carboxylic acid, aminocyclobutanecarboxylic acid, aminocyclopentanecarboxylic acid, aminocyclohexane-
  MOD_RES (2)..(2): carboxylic aminocycloheptanecarboxylic acid, or aminocyclooctanecarboxylic acid
  MOD_RES (10)..(10): valine, tyrosine, phenylalanine, tryptophan, histidine, leucine, isoleucine, serine, threonine, aspartic acid, glutamic acid, alanine, lysine, arginine, cysteine, general formula 1, or general formula 2
  MOD_RES (12)..(12): serine, isoleucine, lysine, arginine, cysteine, general formula 1, or general formula 2
  MOD_RES (16)..(16): glycine, serine, histidine, glutamic acid, aspartic acid, glutamine, asparagine, lysine, arginine, homoglutamic acid, cysteine, homocysteine, or cysteic acid
  MOD_RES (28)..(28): lysine, arginine, aspartic acid, glutamic acid, alanine, asparagine, cysteine, general formula 1, or general formula 2
  MOD_RES (29)..(29): glycine, glutamine, threonine, serine, lysine, arginine, cysteine, general formula 1, or general formula 2
  MOD_RES (30)..(30): arginine, lysine, glycine, histidine, cysteine, general formula 1, or general formula 2
  MOD_RES (31)..(31): -NH2, glycine, threonine, serine, aspartic acid, glutamic acid, tryptophan, tyrosine, phenylalanine, histidine, arginine, lysine, cysteine, a linking or spacer group, general formula 3, general formula 4 or a linking or
  MOD_RES (31)..(31): spacer group +XG32
XXEGTFTSDXSXYLEXQAAKEFIAWLVXXXX

SEQ ID NO: 361 - protein, 31 aa, Unknown
  Description of Unknown: GLP-1 receptor binding polypeptide
  MOD_RES (1)..(1): histidine, D-histidine, deamino-histidine, Beta-hydroxyl-histidine, homohistidine, alpha-fluoromethyl- histidine, alpha-methyl-histidine, N-methyl-histidine, Nalpha-acetyl-histidine,
  MOD_RES (1)..(1): alpha-methyl-histidine, 2-pyridinyl-alanine, 3-pyridinyl- alanine, 4-pyridinyl-alanine, imidazopropionyl
  MOD_RES (2)..(2): 2-methylalanine (Aib), glycine, D-serine, serine, threonine, leucine, isoleucine, alanine, valine, aminocyclopropane- carboxylic acid, aminocyclobutanecarboxylic acid, aminocyclopentanecarboxylic acid, aminocyclohexane-
  MOD_RES (2)..(2): carboxylic aminocycloheptanecarboxylic acid, or aminocyclooctanecarboxylic acid
  MOD_RES (10)..(10): valine, tyrosine, phenylalanine, tryptophan, histidine, leucine, isoleucine, serine, threonine, aspartic acid, glutamic acid, alanine, lysine, arginine, cysteine, general formula 1, or general formula 2
  MOD_RES (16)..(16): glycine, serine, histidine, glutamic acid, aspartic acid, glutamine, asparagine, lysine, arginine, homoglutamic acid, cysteine, homocysteine, or cysteic acid
  MOD_RES (20)..(20): lysine, arginine, aspartic acid, glutamic acid, glutamine, histidine, 2-methylalanine, cysteine, general formula 1, or general formula 2
  MOD_RES (28)..(28): lysine, arginine, aspartic acid, glutamic acid, alanine, asparagine, cysteine, general formula 1, or general formula 2
  MOD_RES (29)..(29): glycine, glutamine, threonine, serine, lysine, arginine, cysteine, general formula 1, or general formula 2
  MOD_RES (30)..(30): arginine, lysine, glycine, histidine, cysteine, general formula 1, or general formula 2
  MOD_RES (31)..(31): -NH2, glycine, threonine, serine, aspartic acid, glutamic acid, tryptophan, tyrosine, phenylalanine, histidine, arginine, lysine, cysteine, a linking or spacer group, general formula 3, general formula 4 or a linking or
  MOD_RES (31)..(31): spacer group +XG32
XXEGTFTSDXSKYLEXQAAXEFIAWLVXXXX

SEQ ID NO: 362 - protein, 31 aa, Unknown
  Description of Unknown: GLP-1 receptor binding polypeptide
  MOD_RES (1)..(1): histidine, D-histidine, deamino-histidine, Beta-hydroxyl-histidine, homohistidine, alpha-fluoromethyl- histidine, alpha-methyl-histidine, N-methyl-histidine, Nalpha-acetyl-histidine,
  MOD_RES (1)..(1): alpha-methyl-histidine, 2-pyridinyl-alanine, 3-pyridinyl- alanine, 4-pyridinyl-alanine, imidazopropionyl
  MOD_RES (2)..(2): 2-methylalanine (Aib), glycine, D-serine, serine, threonine, leucine, isoleucine, alanine, valine, aminocyclopropane- carboxylic acid, aminocyclobutanecarboxylic acid, aminocyclopentanecarboxylic acid, aminocyclohexane-
  MOD_RES (2)..(2): carboxylic aminocycloheptanecarboxylic acid, or aminocyclooctanecarboxylic acid
  MOD_RES (12)..(12): serine, isoleucine, lysine, arginine, cysteine, general formula 1, or general formula 2
  MOD_RES (16)..(16): glycine, serine, histidine, glutamic acid, aspartic acid, glutamine, asparagine, lysine, arginine, homoglutamic acid, cysteine, homocysteine, or cysteic acid
  MOD_RES (20)..(20): lysine, arginine, aspartic acid, glutamic acid, glutamine, histidine, 2-methylalanine, cysteine, general formula 1, or general formula 2
  MOD_RES (28)..(28): lysine, arginine, aspartic acid, glutamic acid, alanine, asparagine, cysteine, general formula 1, or general formula 2
  MOD_RES (29)..(29): glycine, glutamine, threonine, serine, lysine, arginine, cysteine, general formula 1, or general formula 2
  MOD_RES (30)..(30): arginine, lysine, glycine, histidine, cysteine, general formula 1, or general formula 2
  MOD_RES (31)..(31): -NH2, glycine, threonine, serine, aspartic acid, glutamic acid, tryptophan, tyrosine, phenylalanine, histidine, arginine, lysine, cysteine, a linking or spacer group, general formula 3, general formula 4 or a linking or
  MOD_RES (31)..(31): spacer group +XG32
XXEGTFTSDKSXYLEXQAAXEFIAWLVXXXX

SEQ ID NO: 363 - protein, 39 aa, Unknown
  Description of Unknown: GLP-1 receptor binding polypeptide
  MOD_RES (2)..(2): 2-methylalanine (Aib), glycine, D-serine, serine, threonine, leucine, isoleucine, alanine, valine, aminocyclopropane- carboxylic acid, aminocyclobutanecarboxylic acid, aminocyclopentanecarboxylic acid, aminocyclohexane-
  MOD_RES (2)..(2): carboxylic aminocycloheptanecarboxylic acid, or aminocyclooctanecarboxylic acid
  MOD_RES (16)..(16): glycine, serine, histidine, glutamic acid, aspartic acid, glutamine, asparagine, lysine, arginine, homoglutamic acid, cysteine, homocysteine, or cysteic acid
HXEGTFTSDVSSYLEXQAAREFIAWLVRGRPSSGAPPPK

SEQ ID NO: 364 - protein, 39 aa, Unknown
  Description of Unknown: GLP-1 receptor binding polypeptide
  MOD_RES (2)..(2): 2-methylalanine (Aib), glycine, D-serine, serine, threonine, leucine, isoleucine, alanine, valine, aminocyclopropane- carboxylic acid, aminocyclobutanecarboxylic acid, aminocyclopentanecarboxylic acid, aminocyclohexane-
  MOD_RES (2)..(2): carboxylic aminocycloheptanecarboxylic acid, or aminocyclooctanecarboxylic acid
  MOD_RES (16)..(16): glycine, serine, histidine, glutamic acid, aspartic acid, glutamine, asparagine, lysine, arginine, homoglutamic acid, cysteine, homocysteine, or cysteic acid
HXEGTFTSDVSSYLEXQAAREFIAWLVRGRPSSGKPPPS

SEQ ID NO: 365 - protein, 39 aa, Unknown
  Description of Unknown: GLP-1 receptor binding polypeptide
  MOD_RES (2)..(2): 2-methylalanine (Aib), glycine, D-serine, serine, threonine, leucine, isoleucine, alanine, valine, aminocyclopropane- carboxylic acid, aminocyclobutanecarboxylic acid, aminocyclopentanecarboxylic acid, aminocyclohexane-
  MOD_RES (2)..(2): carboxylic aminocycloheptanecarboxylic acid, or aminocyclooctanecarboxylic acid
  MOD_RES (16)..(16): glycine, serine, histidine, glutamic acid, aspartic acid, glutamine, asparagine, lysine, arginine, homoglutamic acid, cysteine, homocysteine, or cysteic acid
HXEGTFTSDVSSYLEXQAAREFIAWLVRGRPSKGAPPPS

SEQ ID NO: 366 - protein, 39 aa, Unknown
  Description of Unknown: GLP-1 receptor binding polypeptide
  MOD_RES (2)..(2): 2-methylalanine (Aib), glycine, D-serine, serine, threonine, leucine, isoleucine, alanine, valine, aminocyclopropane- carboxylic acid, aminocyclobutanecarboxylic acid, aminocyclopentanecarboxylic acid, aminocyclohexane-
  MOD_RES (2)..(2): carboxylic aminocycloheptanecarboxylic acid, or aminocyclooctanecarboxylic acid
  MOD_RES (16)..(16): glycine, serine, histidine, glutamic acid, aspartic acid, glutamine, asparagine, lysine, arginine, homoglutamic acid, cysteine, homocysteine, or cysteic acid
HXEGTFTSDVSSYLEXQAAREFIAWLVRGRPKSGAPPPS

SEQ ID NO: 367 - protein, 31 aa, Unknown
  Description of Unknown: GLP-1 receptor binding polypeptide
  MOD_RES (2)..(2): 2-methylalanine (Aib), glycine, D-serine, serine, threonine, leucine, isoleucine, alanine, valine, aminocyclopropane- carboxylic acid, aminocyclobutanecarboxylic acid, aminocyclopentanecarboxylic acid, aminocyclohexane-
  MOD_RES (2)..(2): carboxylic aminocycloheptanecarboxylic acid, or aminocyclooctanecarboxylic acid
  MOD_RES (16)..(16): glycine, serine, histidine, glutamic acid, aspartic acid, glutamine, asparagine, lysine, arginine, homoglutamic acid, cysteine, homocysteine, or cysteic acid
HXEGTFTSDVSSYLEXQAAREFIAWLVRGRK

SEQ ID NO: 368 - protein, 30 aa, Unknown
  Description of Unknown: GLP-1 receptor binding polypeptide
  MOD_RES (2)..(2): 2-methylalanine (Aib), glycine, D-serine, serine, threonine, leucine, isoleucine, alanine, valine, aminocyclopropane- carboxylic acid, aminocyclobutanecarboxylic acid, aminocyclopentanecarboxylic acid, aminocyclohexane-
  MOD_RES (2)..(2): carboxylic
  MOD_RES (16)..(16): glycine, serine, histidine, glutamic acid, aspartic acid, glutamine, asparagine, lysine, arginine, homoglutamic acid, cysteine, homocysteine, or cysteic acid
HXEGTFTSDVSSYLEXQAAREFIAWLVRGK

SEQ ID NO: 369 - protein, 31 aa, Unknown
  Description of Unknown: GLP-1 receptor binding polypeptide
  MOD_RES (2)..(2): 2-methylalanine (Aib), glycine, D-serine, serine, threonine, leucine, isoleucine, alanine, valine, aminocyclopropane- carboxylic acid, aminocyclobutanecarboxylic acid, aminocyclopentanecarboxylic acid, aminocyclohexane-
  MOD_RES (2)..(2): carboxylic aminocycloheptanecarboxylic acid, or aminocyclooctanecarboxylic acid
  MOD_RES (16)..(16): glycine, serine, histidine, glutamic acid, aspartic acid, glutamine, asparagine, lysine, arginine, homoglutamic acid, cysteine, homocysteine, or cysteic acid
HXEGTFTSDVSSYLEXQAAREFIAWLVRKRG

SEQ ID NO: 370 - protein, 31 aa, Unknown
  Description of Unknown: GLP-1 receptor binding polypeptide
  MOD_RES (2)..(2): 2-methylalanine (Aib), glycine, D-serine, serine, threonine, leucine, isoleucine, alanine, valine, aminocyclopropane- carboxylic acid, aminocyclobutanecarboxylic acid, aminocyclopentanecarboxylic acid, aminocyclohexane-
  MOD_RES (2)..(2): carboxylic aminocycloheptanecarboxylic acid, or aminocyclooctanecarboxylic acid
  MOD_RES (16)..(16): glycine, serine, histidine, glutamic acid, aspartic acid, glutamine, asparagine, lysine, arginine, homoglutamic acid, cysteine, homocysteine, or cysteic acid
HXEGTFTSDVSSYLEXQAAREFIAWLVKGRG

SEQ ID NO: 371 - protein, 31 aa, Unknown
  Description of Unknown: GLP-1 receptor binding polypeptide
  MOD_RES (2)..(2): 2-methylalanine (Aib), glycine, D-serine, serine, threonine, leucine, isoleucine, alanine, valine, aminocyclopropane- carboxylic acid, aminocyclobutanecarboxylic acid, aminocyclopentanecarboxylic acid, aminocyclohexanecarboxylic
  MOD_RES (2)..(2): aminocycloheptanecarboxylic acid, or aminocyclooctanecarboxylic acid
  MOD_RES (16)..(16): glycine, serine, histidine, glutamic acid, aspartic acid, glutamine, asparagine, lysine, arginine, homoglutamic acid, cysteine, homocysteine, or cysteic acid
HXEGTFTSDVSSYLEXQAAREFIAKLVRGRG

SEQ ID NO: 372 - protein, 31 aa, Unknown
  Description of Unknown: GLP-1 receptor binding polypeptide
  MOD_RES (2)..(2): 2-methylalanine (Aib), glycine, D-serine, serine, threonine, leucine, isoleucine, alanine, valine, aminocyclopropane- carboxylic acid, aminocyclobutanecarboxylic acid, aminocyclopentanecarboxylic acid, aminocyclohexane-
  MOD_RES (2)..(2): carboxylic aminocycloheptanecarboxylic acid, or aminocyclooctanecarboxylic acid
  MOD_RES (16)..(16): glycine, serine, histidine, glutamic acid, aspartic acid, glutamine, asparagine, lysine, arginine, homoglutamic acid, cysteine, homocysteine, or cysteic acid
HXEGTFTSDVSSYLEXQAAKEFIAWLVRGRG

SEQ ID NO: 373 - protein, 30 aa, Unknown
  Description of Unknown: GLP-1 receptor binding polypeptide
  MOD_RES (2)..(2): 2-methylalanine (Aib), glycine, D-serine, serine, threonine, leucine, isoleucine, alanine, valine, aminocyclopropane- carboxylic acid, aminocyclobutanecarboxylic acid, aminocyclopentanecarboxylic acid, aminocyclohexane-
  MOD_RES (2)..(2): carboxylic aminocycloheptanecarboxylic acid, or aminocyclooctanecarboxylic acid
  MOD_RES (16)..(16): glycine, serine, histidine, glutamic acid, aspartic acid, glutamine, asparagine, lysine, arginine, homoglutamic acid, cysteine, homocysteine, or cysteic acid
HXEGTFTSDVSSYLEXQAAKEFIAWLVRGR

SEQ ID NO: 374 - protein, 31 aa, Unknown
  Description of Unknown: GLP-1 receptor binding polypeptide
  MOD_RES (2)..(2): 2-methylalanine (Aib), glycine, D-serine, serine, threonine, leucine, isoleucine, alanine, valine, aminocyclopropane- carboxylic acid, aminocyclobutanecarboxylic acid, aminocyclopentanecarboxylic acid, aminocyclohexane-
  MOD_RES (2)..(2): carboxylic aminocycloheptanecarboxylic acid, or aminocyclooctanecarboxylic acid
  MOD_RES (16)..(16): glycine, serine, histidine, glutamic acid, aspartic acid, glutamine, asparagine, lysine, arginine, homoglutamic acid, cysteine, homocysteine, or cysteic acid
HXEGTFTSDVSKYLEXQAAREFIAWLVRGRG

SEQ ID NO: 375 - protein, 31 aa, Unknown
  Description of Unknown: GLP-1 receptor binding polypeptide
  MOD_RES (2)..(2): 2-methylalanine (Aib), glycine, D-serine, serine, threonine, leucine, isoleucine, alanine, valine, aminocyclopropane- carboxylic acid, aminocyclobutanecarboxylic acid, aminocyclopentanecarboxylic acid, aminocyclohexane-
  MOD_RES (2)..(2): carboxylic aminocycloheptanecarboxylic acid, or aminocyclooctanecarboxylic acid
  MOD_RES (16)..(16): glycine, serine, histidine, glutamic acid, aspartic acid, glutamine, asparagine, lysine, arginine, homoglutamic acid, cysteine, homocysteine, or cysteic acid
HXEGTFTSDKSSYLEXQAAREFIAWLVRGRG

SEQ ID NO: 376 - protein, 30 aa, Unknown
  Description of Unknown: GLP-1 receptor binding polypeptide
  MOD_RES (2)..(2): 2-methylalanine (Aib), glycine, D-serine, serine, threonine, leucine, isoleucine, alanine, valine, aminocyclopropane- carboxylic acid, aminocyclobutanecarboxylic acid, aminocyclopentanecarboxylic acid, aminocyclohexane-
  MOD_RES (2)..(2): carboxylic aminocycloheptanecarboxylic acid, or aminocyclooctanecarboxylic acid
  MOD_RES (16)..(16): glycine, serine, histidine, glutamic acid, aspartic acid, glutamine, asparagine, lysine, arginine, homoglutamic acid, cysteine, homocysteine, or cysteic acid
HXEGTFTSDKSSYLEXQAAREFIAWLVRGR

SEQ ID NO: 377 - protein, 154 aa, Artificial Sequence
  Description of Artificial Sequence: Synthetic fusion protein
  MOD_RES (1)..(1): cysteine or absent
  MOD_RES (1)..(1): GLP-1 receptor binding polypeptide - linking group-
  MOD_RES (2)..(2): methionine, cysteine, general formula 1, general formula 2 or absent
  MOD_RES (68)..(68): cysteine or serine
  MOD_RES (71)..(71): cysteine or serine
  MOD_RES (86)..(86): cysteine or asparagine
  MOD_RES (118)..(118): cysteine or serine
  MOD_RES (124)..(124): cysteine or serine
XXRPSGRKSSKMQAFRIWDVNQKTFYLRNNQLVAGYLQGPNVNLEEKIDVVPIEPHALFLGIHGGKMXLSXVKSGDETRLQLEAVXITDLSENRKQDKRFAFIRSDSGPTTSFESAAXPGWFLXTAMEADQPVSLTNMPDEGVMVTKFYFQEDE

SEQ ID NO: 378 - protein, 154 aa, Artificial Sequence
  Description of Artificial Sequence: Synthetic fusion protein
  MOD_RES (1)..(1): cysteine or absent
  MOD_RES (1)..(1): -linking group - GLP-1 receptor binding polypeptide
  MOD_RES (2)..(2): methionine, cysteine, general formula 1, general formula 2 or absent
  MOD_RES (118)..(118): cysteine or serine
XXRPSGRKSSKMQAFRIWDVNQKTFYLRNNQLVAGYLQGPNVNLEEKIDVVPIEPHALFLGIHGGKMCLSCVKSGDETRLQLEAVNITDLSENRKQDKRFAFIRSDSGPTTSFESAAXPGWFLCTAMEADQPVSLTNMPDEGVMVTKFYFQEDE

SEQ ID NO: 379 - protein, 154 aa, Artificial Sequence
  Description of Artificial Sequence: Synthetic fusion protein
  MOD_RES (1)..(1): methionine, cysteine, general formula 1, general formula 2 or absent
  MOD_RES (1)..(1): UL-
  MOD_RES (67)..(67): cysteine or serine
  MOD_RES (70)..(70): cysteine or serine
  MOD_RES (85)..(85): cysteine or asparagine
  MOD_RES (117)..(117): cysteine or serine
  MOD_RES (123)..(123): cysteine or serine
  MOD_RES (154)..(154): cysteine or absent
  MOD_RES (154)..(154): - linking group - GLP-1 receptor binding polypeptide
XRPSGRKSSKMQAFRIWDVNQKTFYLRNNQLVAGYLQGPNVNLEEKIDVVPIEPHALFLGIHGGKMXLSXVKSGDETRLQLEAVXITDLSENRKQDKRFAFIRSDSGPTTSFESAAXPGWFLXTAMEADQPVSLTNMPDEGVMVTKFYFQEDEX

SEQ ID NO: 380 - protein, 22 aa, Unknown
  Description of Unknown: A chain of insulin receptor binding polypeptide
  MOD_RES (8)..(8): threonine, histidine, or arginine
  MOD_RES (21)..(21): alanine, glycine, or asparagine
  MOD_RES (22)..(22): lysine, a dipeptide of arginine-lysine, or absent
GIVEQCCXSICSLYQLENYCXX

SEQ ID NO: 381 - protein, 21 aa, Unknown
  Description of Unknown: A chain of insulin receptor binding polypeptide
GIVEQCCTSICSLYQLENYCN

SEQ ID NO: 382 - protein, 27 aa, Unknown
  Description of Unknown: B chain of the insulin receptor binding polypeptide
  MOD_RES (1)..(1): tetrapeptide of phenylalanine-valine-asparagine-glutamine, a tripeptide of valine-asparagine-glutamine, a dipeptide of asparagine-glutamine, glutamine, or absent
  MOD_RES (22)..(22): tyrosine, or phenylalanine
  MOD_RES (23)..(23): -NH2, dA-NH2, tyrosine, or phenylalanine
  MOD_RES (24)..(24): threonine, asparagine, or absent
  MOD_RES (25)..(25): lysine, proline, glutamic acid, aspartic acid, or absent
  MOD_RES (26)..(26): proline, arginine, lysine, glutamic acid, aspartic acid, or absent
  MOD_RES (27)..(27): threonine, threonine-arginine-arginine, or absent
XHLCGSHLVEALYLVCGERGFXXXXXX

SEQ ID NO: 383 - protein, 49 aa, Unknown
  Description of Unknown: single-chain insulin receptor binding polypeptide
  MOD_RES (1)..(1): tetrapeptide of phenylalanine-valine-asparagine-glutamine, a tripeptide of valine-asparagine-glutamine, a dipeptide of asparagine-glutamine, glutamine, a sequence wherein any one of the amino acid residues in the sequence of the
  MOD_RES (1)..(1): tetrapeptide, tripeptide, and dipeptide is substituted with a lysine or arginine, or absent
  MOD_RES (7)..(7): histidine, phenylalanine, arginine, or glutamine
  MOD_RES (19)..(19): arginine, alanine, glutamic acid, or aspartic acid
  MOD_RES (22)..(22): phenylalanine, tyrosine, or histidine
  MOD_RES (23)..(23): tyrosine, phenylalanine, or absent
  MOD_RES (24)..(24): threonine, asparagine, or absent
  MOD_RES (25)..(25): proline, lysine, glutamic acid, aspartic acid, or absent
  MOD_RES (26)..(26): lysine, proline, arginine, glutamic acid, aspartic acid or absent
  MOD_RES (27)..(27): threonine, or absent
  MOD_RES (27)..(28): Xaa27 andG28 are linked by CL
  MOD_RES (35)..(35): threonine, histidine, or arginine
  MOD_RES (48)..(48): alanine, glycine, or asparagine
  MOD_RES (49)..(49): lysine, a dipeptide of arginine-lysine, or absent
XHLCGSXLVEALYLVCGEXGFXXXXXXGIVEQCCXSICSLYQLENYCXX

SEQ ID NO: 384 - protein, 12 aa, Unknown
  Description of Unknown: CL
  MOD_RES (2)..(2): lysine, cysteine, serine, or alanine
  MOD_RES (3)..(3): glycine, lysine, or serine
  MOD_RES (4)..(4): lysine or serine
  MOD_RES (5)..(5): lysine or serine
  MOD_RES (6)..(6): lysine, serine, or alanine
  MOD_RES (7)..(7): glycine, lysine, arginine, alanine, proline, or absent
  MOD_RES (8)..(8): glycine, alanine, arginine, lysine, glutamine, proline, or absent
  MOD_RES (9)..(9): arginine, lysine, glycine, alanine, proline, threonine, glutamine, or absent
  MOD_RES (10)..(10): proline, glutamine, lysine, glycine, arginine, or absent
  MOD_RES (11)..(11): glutamine, threonine, lysine, glycine, arginine, or absent
  MOD_RES (12)..(12): threonine, arginine, lysine, or absent
GXXXXXXXXXXX

SEQ ID NO: 385 - protein, 12 aa, Unknown
  Description of Unknown: CL peptide
GAGSSSAAAPQT

SEQ ID NO: 386 - protein, 12 aa, Unknown
  Description of Unknown: CL peptide
GSGSSSAAAPQT

SEQ ID NO: 387 - protein, 11 aa, Unknown
  Description of Unknown: CL peptide
GSGSSSAAPQT

SEQ ID NO: 388 - protein, 10 aa, Unknown
  Description of Unknown: CL peptide
GSGSSSAPQT

SEQ ID NO: 389 - protein, 9 aa, Unknown
  Description of Unknown: CL peptide
GSGSSAPQT

SEQ ID NO: 390 - protein, 51 aa, Unknown
  Description of Unknown: single-chain insulin receptor binding polypeptide
  MOD_RES (26)..(26): tyrosine, phenylalanine, or absent
  MOD_RES (27)..(27): threonine, asparagine, or absent
  MOD_RES (28)..(28): proline, lysine, glutamic acid, aspartic acid, or absent
  MOD_RES (29)..(29): lysine, proline, arginine, glutamic acid, aspartic acid or absent
  MOD_RES (30)..(30): threonine, or absent
  MOD_RES (30)..(31): Xaa30 and G31 are linked by CL
FVNQHLCGSHLVEALYLVCGERGFFXXXXXGIVEQCCTSICSLYQLENYCN

SEQ ID NO: 391 - protein, 22 aa, Unknown
  Description of Unknown: A chain of the insulin receptor binding polypeptide
  MOD_RES (12)..(12): serine or a structure of general formula 1
  MOD_RES (14)..(14): tyrosine or a structure of general formula 1
  MOD_RES (15)..(15): glutamine or a structure of general formula 1
  MOD_RES (17)..(17): glutamic acid or a structure of general formula 1
  MOD_RES (18)..(18): asparagine or a structure of general formula 1
  MOD_RES (21)..(21): asparagine, alanine, or glycine
  MOD_RES (22)..(22): lysine, general formula 3, arginine-general formula 3 or absent
GIVEQCCTSICXLXXLXXYCXX

SEQ ID NO: 392 - protein, 28 aa, Unknown
  Description of Unknown: B chain of the insulin receptor binding polypeptide
  MOD_RES (1)..(1): glycine-proline-glutamic acid tripeptide, UL-glycine-proline-glutamic acid, a tetrapeptide of phenylalanine-valine-asparagine-glutamine or UL-phenylalanine-valine-asparagine-glutamine
  MOD_RES (22)..(22): tyrosine or phenylalanine
  MOD_RES (23)..(23): -NH2, phenylalanine, tyrosine, or absent
  MOD_RES (24)..(24): threonine, asparagine, or absent
  MOD_RES (25)..(25): lysine, arginine, glutamic acid, aspartic acid, proline, or absent
  MOD_RES (26)..(26): proline, lysine, arginine, glutamic acid, aspartic acid, or absent, or is a structure of general formula 1 or 3
  MOD_RES (27)..(27): threonine, lysine, or absent, or is a structure of general formula 1 or 3
  MOD_RES (28)..(28): lysine or absent, or is a structure of general formula 3
XHLCGSHLVEALYLVCGERGFXXXXXXX

SEQ ID NO: 393 - protein, 61 aa, Unknown
  Description of Unknown: single-chain insulin receptor binding polypeptide
  MOD_RES (1)..(1): a tetrapeptide of phenylalanine-valine-asparagine-glutamine, a tripeptide of valine-asparagine-glutamine, a dipeptide of asparagine-glutamine, glutamine, a sequence wherein any one of the amino acid residues in the sequence of the
  MOD_RES (1)..(1): tetrapeptide,tripeptide, and dipeptide is substituted with a lysine or arginine, or absent
  MOD_RES (1)..(1): UL-
  MOD_RES (22)..(22): phenylalanine, histidine or tyrosine
  MOD_RES (23)..(23): -NH2, tyrosine, phenylalanine, or absent
  MOD_RES (24)..(24): threonine, asparagine, or absent
  MOD_RES (25)..(25): proline, lysine, glutamic acid, aspartic acid, or absent
  MOD_RES (26)..(26): aspartic acid, glutamic acid, proline, arginine, lysine, absent or a structure of general formula 1
  MOD_RES (27)..(27): threonine, a structure of general formula 1, or absent
  MOD_RES (29)..(29): serine, alanine, glycine, lysine, a structure of general formula 1, or absent
  MOD_RES (30)..(30): glycine, a structure of general formula 1, or absent
  MOD_RES (31)..(31): lysine, glycine, serine, a structure of general formula 1, or absent
  MOD_RES (32)..(32): lysine, glycine, serine, a structure of general formula 1, or absent
  MOD_RES (33)..(33): lysine, glycine, serine, alanine, a structure of general formula 1, or absent
  MOD_RES (34)..(34): lysine, arginine, alanine, proline, glycine, a structure of general formula 1, or absent
  MOD_RES (35)..(35): glycine, alanine, arginine, lysine, glutamine, proline, a structure of general formula 1, or absent
  MOD_RES (36)..(36): arginine, alanine, proline, threonine, glutamine, glycine, a structure of general formula 1, or absent
  MOD_RES (37)..(37): proline, glutamine, arginine, glycine, absent, or a structure of general formula 1
  MOD_RES (38)..(38): glutamine, threonine, arginine, glycine, absent, or a structure of general formula 1
  MOD_RES (39)..(39): threonine, arginine, lysine, or absent
  MOD_RES (47)..(47): threonine, histidine, arginine or a structure of general formula 1
  MOD_RES (51)..(51): serine or a structure of general formula 1
  MOD_RES (53)..(53): tyrosine or a structure of general formula 1
  MOD_RES (54)..(54): glutamine or a structure of general formula 1
  MOD_RES (56)..(56): glutamic acid or a structure of general formula 1
  MOD_RES (57)..(57): asparagine or a structure of general formula 1
  MOD_RES (60)..(60): aspartic acid, glycine, alanine, or a structure of general formula 1
  MOD_RES (61)..(61): lysine, general formula 3, arginine-general formula 3, or absent
XHLCGSHLVEALYLVCGERGFXXXXXXGXXXXXXXXXXXGIVEQCCXSICXLXXLXXYCXX

SEQ ID NO: 394 - protein, 64 aa, Unknown
  Description of Unknown: single-chain insulin receptor binding polypeptide
  MOD_RES (26)..(26): -NH2, tyrosine, phenylalanine, or absent
  MOD_RES (27)..(27): threonine, asparagine, or absent
  MOD_RES (28)..(28): proline, lysine, glutamic acid, aspartic acid, or absent
  MOD_RES (29)..(29): aspartic acid, glutamic acid, proline, arginine, lysine, absent or a structure of general formula 1
  MOD_RES (30)..(30): threonine, a structure of general formula 1, or absent
  MOD_RES (32)..(32): serine, alanine, glycine, lysine, a structure of general formula 1, or absent
  MOD_RES (33)..(33): glycine, a structure of general formula 1, or absent
  MOD_RES (34)..(34): lysine, glycine, serine, a structure of general formula 1, or absent
  MOD_RES (35)..(35): lysine, glycine, serine, a structure of general formula 1, or absent
  MOD_RES (36)..(36): lysine, glycine, serine, alanine, a structure of general formula 1, or absent
  MOD_RES (37)..(37): lysine, arginine, alanine, proline, glycine, a structure of general formula 1, or absent
  MOD_RES (38)..(38): glycine, alanine, arginine, lysine, glutamine, proline, a structure of general formula 1, or absent
  MOD_RES (39)..(39): arginine, alanine, proline, threonine, glutamine, glycine, a structure of general formula 1, or absent
  MOD_RES (40)..(40): proline, glutamine, arginine, glycine, absent, or a structure of general formula 1
  MOD_RES (41)..(41): glutamine, threonine, arginine, glycine, absent, or a structure of general formula 1
  MOD_RES (42)..(42): threonine, arginine, lysine, or absent
  MOD_RES (64)..(64): lysine, general formula 3, arginine-general formula 3, or absent
FVNQHLCGSHLVEALYLVCGERGFFXXXXXGXXXXXXXXXXXGIVEQCCTSICSLYQLENYCNX

SEQ ID NO: 395 - protein, 202 aa, Artificial Sequence
  Description of Artificial Sequence: Synthetic fusion protein
  MOD_RES (1)..(1): a tetrapeptide of phenylalanine-valine-asparagine-glutamine, a tripeptide of valine-asparagine-glutamine, a dipeptide of asparagine-glutamine, glutamine, a sequence wherein any one of the amino acid residues in the sequence of the
  MOD_RES (1)..(1): tetrapeptide, tripeptide, and dipeptide is substituted with a lysine or arginine, or absent
  MOD_RES (1)..(1): UL-
  MOD_RES (7)..(7): histidine, phenylalanine, arginine, or glutamine
  MOD_RES (19)..(19): arginine, alanine, glutamic acid, or aspartic acid
  MOD_RES (22)..(22): phenylalanine, tyrosine, or histidine
  MOD_RES (23)..(23): tyrosine, phenylalanine, or absent
  MOD_RES (24)..(24): threonine, asparagine, or absent
  MOD_RES (25)..(25): proline, lysine, glutamic acid, aspartic acid, or absent
  MOD_RES (26)..(26): lysine, proline, arginine, glutamic acid, aspartic acid or absent
  MOD_RES (27)..(27): threonine, or absent
  MOD_RES (27)..(28): Xaa27 and G28 are linked by CL
  MOD_RES (35)..(35): threonine, histidine, or arginine
  MOD_RES (48)..(48): alanine, glycine, or asparagine
  MOD_RES (49)..(49): lysine, a dipeptide of arginine-lysine, or absent
  MOD_RES (49)..(50): Xaa49 and Xaa50 are linked by Lj
  MOD_RES (50)..(50): methionine, cysteine, general formula 1, general formula 2 or absent
  MOD_RES (116)..(116): cysteine or serine
  MOD_RES (119)..(119): cysteine or serine
  MOD_RES (134)..(134): cysteine or asparagine
  MOD_RES (166)..(166): cysteine or serine
  MOD_RES (172)..(172): cysteine or serine
XHLCGSXLVEALYLVCGEXGFXXXXXXGIVEQCCXSICSLYQLENYCXXXRPSGRKSSKMQAFRIWDVNQKTFYLRNNQLVAGYLQGPNVNLEEKIDVVPIEPHALFLGIHGGKMXLSXVKSGDETRLQLEAVXITDLSENRKQDKRFAFIRSDSGPTTSFESAAXPGWFLXTAMEADQPVSLTNMPDEGVMVTKFYFQEDE

SEQ ID NO: 396 - protein, 262 aa, Artificial Sequence
  Description of Artificial Sequence: Synthetic fusion protein
  MOD_RES (1)..(1): a tetrapeptide of phenylalanine-valine-asparagine-glutamine, a tripeptide of valine-asparagine-glutamine, a dipeptide of asparagine-glutamine, glutamine, a sequence wherein any one of the amino acid residues in the sequence of the
  MOD_RES (1)..(1): tetrapeptide,tripeptide, and dipeptide is substituted with a lysine or arginine, or absent
  MOD_RES (1)..(1): UL-
  MOD_RES (22)..(22): phenylalanine, tyrosine, or histidine
  MOD_RES (23)..(23): tyrosine, phenylalanine, or absent
  MOD_RES (24)..(24): threonine, asparagine, or absent
  MOD_RES (25)..(25): proline, lysine, glutamic acid, aspartic acid, or absent
  MOD_RES (26)..(26): lysine, proline, arginine, glutamic acid, aspartic acid or absent
  MOD_RES (27)..(27): threonine, or absent
  MOD_RES (27)..(28): Xaa27 and G28 are linked by CL
  MOD_RES (49)..(78): "GGGGS" is repeated for 0, 1, 2, 3, 4, 5 or 6 times
  MOD_RES (79)..(79): cysteine, lysine, absent, general formula 1, or general formula 2
  MOD_RES (80)..(109): "GGGGS" is repeated for 0, 1, 2, 3, 4, 5 or 6 times
  MOD_RES (110)..(110): methionine, cysteine, general formula 1, general formula 2 or absent
  MOD_RES (176)..(176): cysteine or serine
  MOD_RES (179)..(179): cysteine or serine
  MOD_RES (194)..(194): cysteine or asparagine
  MOD_RES (226)..(226): cysteine or serine
  MOD_RES (232)..(232): cysteine or serine
XHLCGSHLVEALYLVCGERGFXXXXXXGIVEQCCTSICSLYQLENYCNGGGGSGGGGSGGGGSGGGGSGGGGSGGGGSXGGGGSGGGGSGGGGSGGGGSGGGGSGGGGSXRPSGRKSSKMQAFRIWDVNQKTFYLRNNQLVAGYLQGPNVNLEEKIDVVPIEPHALFLGIHGGKMXLSXVKSGDETRLQLEAVXITDLSENRKQDKRFAFIRSDSGPTTSFESAAXPGWFLXTAMEADQPVSLTNMPDEGVMVTKFYFQEDE

SEQ ID NO: 397 - protein, 265 aa, Artificial Sequence
  Description of Artificial Sequence: Synthetic fusion protein
  MOD_RES (1)..(1): UL-
  MOD_RES (30)..(31): T30 and G31 are linked by CL
  MOD_RES (52)..(81): "GGGGS" is repeated for 0, 1, 2, 3, 4, 5 or 6 times
  MOD_RES (82)..(82): cysteine, lysine, absent, general formula 1, or general formula 2
  MOD_RES (83)..(112): "GGGGS" is repeated for 0, 1, 2, 3, 4, 5 or 6 times
  MOD_RES (113)..(113): methionine, cysteine, general formula 1, general formula 2 or absent
  MOD_RES (179)..(179): cysteine or serine
  MOD_RES (182)..(182): cysteine or serine
  MOD_RES (229)..(229): cysteine or serine
  MOD_RES (235)..(235): cysteine or serine
FVNQHLCGSHLVEALYLVCGERGFFYTPKTGIVEQCCTSICSLYQLENYCNGGGGSGGGGSGGGGSGGGGSGGGGSGGGGSXGGGGSGGGGSGGGGSGGGGSGGGGSGGGGSXRPSGRKSSKMQAFRIWDVNQKTFYLRNNQLVAGYLQGPNVNLEEKIDVVPIEPHALFLGIHGGKMXLSXVKSGDETRLQLEAVNITDLSENRKQDKRFAFIRSDSGPTTSFESAAXPGWFLXTAMEADQPVSLTNMPDEGVMVTKFYFQEDE

SEQ ID NO: 398 - protein, 234 aa, Artificial Sequence
  Description of Artificial Sequence: Synthetic fusion protein
  MOD_RES (1)..(1): UL-
  MOD_RES (30)..(31): T30 and G31 are linked by CL
  MOD_RES (52)..(81): G52 and S56 are repeated for 0, 1, 2, 3, 4, 5 or 6 times
  MOD_RES (82)..(82): methionine, cysteine, general formula 1, general formula 2 or absent
  MOD_RES (148)..(148): cysteine or serine
  MOD_RES (151)..(151): cysteine or serine
  MOD_RES (198)..(198): cysteine or serine
  MOD_RES (204)..(204): cysteine or serine
FVNQHLCGSHLVEALYLVCGERGFFYTPKTGIVEQCCTSICSLYQLENYCNGGGGSGGGGSGGGGSGGGGSGGGGSGGGGSXRPSGRKSSKMQAFRIWDVNQKTFYLRNNQLVAGYLQGPNVNLEEKIDVVPIEPHALFLGIHGGKMXLSXVKSGDETRLQLEAVNITDLSENRKQDKRFAFIRSDSGPTTSFESAAXPGWFLXTAMEADQPVSLTNMPDEGVMVTKFYFQEDE

SEQ ID NO: 399 - protein, 202 aa, Artificial Sequence
  Description of Artificial Sequence: Synthetic fusion protein
  MOD_RES (1)..(1): methionine, cysteine, general formula 1, general formula 2 or absent
  MOD_RES (1)..(1): UL-
  MOD_RES (67)..(67): cysteine or serine
  MOD_RES (70)..(70): cysteine or serine
  MOD_RES (85)..(85): cysteine or asparagine
  MOD_RES (117)..(117): cysteine or serine
  MOD_RES (123)..(123): cysteine or serine
  MOD_RES (153)..(154): E153 and Xaa154 are linked by Lj
  MOD_RES (154)..(154): a tetrapeptide of phenylalanine-valine-asparagine-glutamine, a tripeptide of valine-asparagine-glutamine, a dipeptide of asparagine-glutamine, glutamine, a sequence wherein any one of the amino acid residues in the sequence of the
  MOD_RES (154)..(154): tetrapeptide,tripeptide, and dipeptide is substituted with a lysine or arginine, or absent
  MOD_RES (160)..(160): histidine, phenylalanine, arginine, or glutamine
  MOD_RES (172)..(172): arginine, alanine, glutamic acid, or aspartic acid
  MOD_RES (175)..(175): phenylalanine, tyrosine, or histidine
  MOD_RES (176)..(176): tyrosine, phenylalanine, or absent
  MOD_RES (177)..(177): threonine, asparagine, or absent
  MOD_RES (178)..(178): proline, lysine, glutamic acid, aspartic acid, or absent
  MOD_RES (179)..(179): lysine, proline, arginine, glutamic acid, aspartic acid or absent
  MOD_RES (180)..(180): threonine, or absent
  MOD_RES (180)..(181): Xaa180 and G181 are linked by CL
  MOD_RES (188)..(188): threonine, histidine, or arginine
  MOD_RES (201)..(201): alanine, glycine, or asparagine
  MOD_RES (202)..(202): lysine, a dipeptide of arginine-lysine, or absent
XRPSGRKSSKMQAFRIWDVNQKTFYLRNNQLVAGYLQGPNVNLEEKIDVVPIEPHALFLGIHGGKMXLSXVKSGDETRLQLEAVXITDLSENRKQDKRFAFIRSDSGPTTSFESAAXPGWFLXTAMEADQPVSLTNMPDEGVMVTKFYFQEDEXHLCGSXLVEALYLVCGEXGFXXXXXXGIVEQCCXSICSLYQLENYCXX

SEQ ID NO: 400 - protein, 263 aa, Artificial Sequence
  Description of Artificial Sequence: Synthetic fusion protein
  MOD_RES (1)..(1): methionine, cysteine, general formula 1, general formula 2 or absent
  MOD_RES (1)..(1): UL-
  MOD_RES (67)..(67): cysteine or serine
  MOD_RES (70)..(70): cysteine or serine
  MOD_RES (85)..(85): cysteine or asparagine
  MOD_RES (117)..(117): cysteine or serine
  MOD_RES (123)..(123): cysteine or serine
  MOD_RES (154)..(183): "GGGGS" is repeated for 0, 1, 2, 3, 4, 5 or 6 times
  MOD_RES (184)..(184): cysteine, lysine, absent, general formula 1, or general formula 2
  MOD_RES (185)..(214): "GGGGS" is repeated for 0, 1, 2, 3, 4, 5 or 6 times
  MOD_RES (215)..(215): a tetrapeptide of phenylalanine-valine-asparagine-glutamine, a tripeptide of valine-asparagine-glutamine, a dipeptide of asparagine-glutamine, glutamine, a sequence wherein any one of the amino acid residues in the sequence of the
  MOD_RES (215)..(215): tetrapeptide,tripeptide, and dipeptide is substituted with a lysine or arginine, or absent
  MOD_RES (236)..(236): phenylalanine, tyrosine, or histidine
  MOD_RES (237)..(237): tyrosine, phenylalanine, or absent
  MOD_RES (238)..(238): threonine, asparagine, or absent
  MOD_RES (239)..(239): proline, lysine, glutamic acid, aspartic acid, or absent
  MOD_RES (240)..(240): lysine, proline, arginine, glutamic acid, aspartic acid or absent
  MOD_RES (241)..(241): threonine, or absent
  MOD_RES (241)..(242): Xaa241 and G242 are linked by CL
  MOD_RES (262)..(262): alanine, glycine, or asparagine
  MOD_RES (263)..(263): lysine, a dipeptide of arginine-lysine, or absent
XRPSGRKSSKMQAFRIWDVNQKTFYLRNNQLVAGYLQGPNVNLEEKIDVVPIEPHALFLGIHGGKMXLSXVKSGDETRLQLEAVXITDLSENRKQDKRFAFIRSDSGPTTSFESAAXPGWFLXTAMEADQPVSLTNMPDEGVMVTKFYFQEDEGGGGSGGGGSGGGGSGGGGSGGGGSGGGGSXGGGGSGGGGSGGGGSGGGGSGGGGSGGGGSXHLCGSHLVEALYLVCGERGFXXXXXXGIVEQCCTSICSLYQLENYCXX

SEQ ID NO: 401 - protein, 265 aa, Artificial Sequence
  Description of Artificial Sequence: Synthetic fusion protein
  MOD_RES (1)..(1): methionine, cysteine, general formula 1, general formula 2 or absent
  MOD_RES (1)..(1): UL-
  MOD_RES (67)..(67): cysteine or serine
  MOD_RES (70)..(70): cysteine or serine
  MOD_RES (117)..(117): cysteine or serine
  MOD_RES (123)..(123): cysteine or serine
  MOD_RES (154)..(183): "GGGGS" is repeated for 0, 1, 2, 3, 4, 5 or 6 times
  MOD_RES (184)..(184): cysteine, lysine, absent, general formula 1, or general formula 2
  MOD_RES (185)..(214): "GGGGS" is repeated for 0, 1, 2, 3, 4, 5 or 6 times
  MOD_RES (244)..(245): T244 and G245 are linked by CL
XRPSGRKSSKMQAFRIWDVNQKTFYLRNNQLVAGYLQGPNVNLEEKIDVVPIEPHALFLGIHGGKMXLSXVKSGDETRLQLEAVNITDLSENRKQDKRFAFIRSDSGPTTSFESAAXPGWFLXTAMEADQPVSLTNMPDEGVMVTKFYFQEDEGGGGSGGGGSGGGGSGGGGSGGGGSGGGGSXGGGGSGGGGSGGGGSGGGGSGGGGSGGGGSFVNQHLCGSHLVEALYLVCGERGFFYTPKTGIVEQCCTSICSLYQLENYCN

SEQ ID NO: 402 - protein, 234 aa, Artificial Sequence
  Description of Artificial Sequence: Synthetic fusion protein
  MOD_RES (1)..(1): methionine, cysteine, general formula 1, general formula 2 or absent
  MOD_RES (1)..(1): UL-
  MOD_RES (67)..(67): cysteine or serine
  MOD_RES (70)..(70): cysteine or serine
  MOD_RES (117)..(117): cysteine or serine
  MOD_RES (123)..(123): cysteine or serine
  MOD_RES (154)..(183): "GGGGS" is repeated for 0, 1, 2, 3, 4, 5 or 6 times
  MOD_RES (213)..(214): T213 and G214 are linked by CL
XRPSGRKSSKMQAFRIWDVNQKTFYLRNNQLVAGYLQGPNVNLEEKIDVVPIEPHALFLGIHGGKMXLSXVKSGDETRLQLEAVNITDLSENRKQDKRFAFIRSDSGPTTSFESAAXPGWFLXTAMEADQPVSLTNMPDEGVMVTKFYFQEDEGGGGSGGGGSGGGGSGGGGSGGGGSGGGGSFVNQHLCGSHLVEALYLVCGERGFFYTPKTGIVEQCCTSICSLYQLENYCN

SEQ ID NO: 403 - protein, 277 aa, Artificial Sequence
  Description of Artificial Sequence: Synthetic fusion protein
  MOD_RES (1)..(1): methionine, cysteine, general formula 1, general formula 2 or absent
  MOD_RES (1)..(1): UL-
  MOD_RES (67)..(67): cysteine or serine
  MOD_RES (70)..(70): cysteine or serine
  MOD_RES (85)..(85): cysteine or asparagine
  MOD_RES (117)..(117): cysteine or serine
  MOD_RES (123)..(123): cysteine or serine
  MOD_RES (154)..(183): "GGGGS" is repeated for 0, 1, 2, 3, 4, 5 or 6 times
  MOD_RES (184)..(184): cysteine, lysine, absent, general formula 1, or general formula 2
  MOD_RES (185)..(214): "GGGGS" is repeated for 0, 1, 2, 3, 4, 5 or 6 times
XRPSGRKSSKMQAFRIWDVNQKTFYLRNNQLVAGYLQGPNVNLEEKIDVVPIEPHALFLGIHGGKMXLSXVKSGDETRLQLEAVXITDLSENRKQDKRFAFIRSDSGPTTSFESAAXPGWFLXTAMEADQPVSLTNMPDEGVMVTKFYFQEDEGGGGSGGGGSGGGGSGGGGSGGGGSGGGGSXGGGGSGGGGSGGGGSGGGGSGGGGSGGGGSFVNQHLCGSHLVEALYLVCGERGFFYTPKTGSGSSSAAAPQTGIVEQCCTSICSLYQLENYCN

SEQ ID NO: 404 - protein, 848 aa, Artificial Sequence
  Description of Artificial Sequence: Synthetic fusion protein
  MOD_RES (586)..(615): "GGGGS" is repeated for 0, 1, 2, 3, 4, 5 or 6 times
  MOD_RES (645)..(646): T645 and G646 are linked by CL
  MOD_RES (667)..(696): "GGGGS" is repeated for 0, 1, 2, 3, 4, 5 or 6 times
  MOD_RES (762)..(762): cysteine or serine
  MOD_RES (765)..(765): cysteine or serine
  MOD_RES (812)..(812): cysteine or serine
  MOD_RES (818)..(818): cysteine or serine
DAHKSEVAHRFKDLGEENFKALVLIAFAQYLQQCPFEDHVKLVNEVTEFAKTCVADESAENCDKSLHTLFGDKLCTVATLRETYGEMADCCAKQEPERNECFLQHKDDNPNLPRLVRPEVDVMCTAFHDNEETFLKKYLYEIARRHPYFYAPELLFFAKRYKAAFTECCQAADKAACLLPKLDELRDEGKASSAKQRLKCASLQKFGERAFKAWAVARLSQRFPKAEFAEVSKLVTDLTKVHTECCHGDLLECADDRADLAKYICENQDSISSKLKECCEKPLLEKSHCIAEVENDEMPADLPSLAADFVESKDVCKNYAEAKDVFLGMFLYEYARRHPDYSVVLLLRLAKTYETTLEKCCAAADPHECYAKVFDEFKPLVEEPQNLIKQNCELFEQLGEYKFQNALLVRYTKKVPQVSTPTLVEVSRNLGKVGSKCCKHPEAKRMPCAEDYLSVVLNQLCVLHEKTPVSDRVTKCCTESLVNRRPCFSALEVDETYVPKEFNAETFTFHADICTLSEKERQIKKQTALVELVKHKPKATKEQLKAVMDDFAAFVEKCCKADDKETCFAEEGKKLVAASQAALGLGGGGSGGGGSGGGGSGGGGSGGGGSGGGGSFVNQHLCGSHLVEALYLVCGERGFFYTPKTGIVEQCCTSICSLYQLENYCNGGGGSGGGGSGGGGSGGGGSGGGGSGGGGSRPSGRKSSKMQAFRIWDVNQKTFYLRNNQLVAGYLQGPNVNLEEKIDVVPIEPHALFLGIHGGKMXLSXVKSGDETRLQLEAVNITDLSENRKQDKRFAFIRSDSGPTTSFESAAXPGWFLXTAMEADQPVSLTNMPDEGVMVTKFYFQEDE

SEQ ID NO: 405 - protein, 848 aa, Artificial Sequence
  Description of Artificial Sequence: Synthetic fusion protein
  MOD_RES (30)..(31): T30 and G31 are linked by CL
  MOD_RES (52)..(81): "GGGGS" is repeated for 0, 1, 2, 3, 4, 5 or 6 times
  MOD_RES (667)..(696): "GGGGS" is repeated for 0, 1, 2, 3, 4, 5 or 6 times
  MOD_RES (762)..(762): cysteine or serine
  MOD_RES (765)..(765): cysteine or serine
  MOD_RES (812)..(812): cysteine or serine
  MOD_RES (818)..(818): cysteine or serine
FVNQHLCGSHLVEALYLVCGERGFFYTPKTGIVEQCCTSICSLYQLENYCNGGGGSGGGGSGGGGSGGGGSGGGGSGGGGSDAHKSEVAHRFKDLGEENFKALVLIAFAQYLQQCPFEDHVKLVNEVTEFAKTCVADESAENCDKSLHTLFGDKLCTVATLRETYGEMADCCAKQEPERNECFLQHKDDNPNLPRLVRPEVDVMCTAFHDNEETFLKKYLYEIARRHPYFYAPELLFFAKRYKAAFTECCQAADKAACLLPKLDELRDEGKASSAKQRLKCASLQKFGERAFKAWAVARLSQRFPKAEFAEVSKLVTDLTKVHTECCHGDLLECADDRADLAKYICENQDSISSKLKECCEKPLLEKSHCIAEVENDEMPADLPSLAADFVESKDVCKNYAEAKDVFLGMFLYEYARRHPDYSVVLLLRLAKTYETTLEKCCAAADPHECYAKVFDEFKPLVEEPQNLIKQNCELFEQLGEYKFQNALLVRYTKKVPQVSTPTLVEVSRNLGKVGSKCCKHPEAKRMPCAEDYLSVVLNQLCVLHEKTPVSDRVTKCCTESLVNRRPCFSALEVDETYVPKEFNAETFTFHADICTLSEKERQIKKQTALVELVKHKPKATKEQLKAVMDDFAAFVEKCCKADDKETCFAEEGKKLVAASQAALGLGGGGSGGGGSGGGGSGGGGSGGGGSGGGGSRPSGRKSSKMQAFRIWDVNQKTFYLRNNQLVAGYLQGPNVNLEEKIDVVPIEPHALFLGIHGGKMXLSXVKSGDETRLQLEAVNITDLSENRKQDKRFAFIRSDSGPTTSFESAAXPGWFLXTAMEADQPVSLTNMPDEGVMVTKFYFQEDE

SEQ ID NO: 406 - protein, 848 aa, Artificial Sequence
  Description of Artificial Sequence: Synthetic fusion protein
  MOD_RES (30)..(31): T30 and G31 are linked by CL
  MOD_RES (52)..(81): "GGGGS" is repeated for 0, 1, 2, 3, 4, 5 or 6 times
  MOD_RES (147)..(147): cysteine or serine
  MOD_RES (150)..(150): cysteine or serine
  MOD_RES (197)..(197): cysteine or serine
  MOD_RES (203)..(203): cysteine or serine
  MOD_RES (234)..(263): "GGGGS" is repeated for 0, 1, 2, 3, 4, 5 or 6 times
FVNQHLCGSHLVEALYLVCGERGFFYTPKTGIVEQCCTSICSLYQLENYCNGGGGSGGGGSGGGGSGGGGSGGGGSGGGGSRPSGRKSSKMQAFRIWDVNQKTFYLRNNQLVAGYLQGPNVNLEEKIDVVPIEPHALFLGIHGGKMXLSXVKSGDETRLQLEAVNITDLSENRKQDKRFAFIRSDSGPTTSFESAAXPGWFLXTAMEADQPVSLTNMPDEGVMVTKFYFQEDEGGGGSGGGGSGGGGSGGGGSGGGGSGGGGSDAHKSEVAHRFKDLGEENFKALVLIAFAQYLQQCPFEDHVKLVNEVTEFAKTCVADESAENCDKSLHTLFGDKLCTVATLRETYGEMADCCAKQEPERNECFLQHKDDNPNLPRLVRPEVDVMCTAFHDNEETFLKKYLYEIARRHPYFYAPELLFFAKRYKAAFTECCQAADKAACLLPKLDELRDEGKASSAKQRLKCASLQKFGERAFKAWAVARLSQRFPKAEFAEVSKLVTDLTKVHTECCHGDLLECADDRADLAKYICENQDSISSKLKECCEKPLLEKSHCIAEVENDEMPADLPSLAADFVESKDVCKNYAEAKDVFLGMFLYEYARRHPDYSVVLLLRLAKTYETTLEKCCAAADPHECYAKVFDEFKPLVEEPQNLIKQNCELFEQLGEYKFQNALLVRYTKKVPQVSTPTLVEVSRNLGKVGSKCCKHPEAKRMPCAEDYLSVVLNQLCVLHEKTPVSDRVTKCCTESLVNRRPCFSALEVDETYVPKEFNAETFTFHADICTLSEKERQIKKQTALVELVKHKPKATKEQLKAVMDDFAAFVEKCCKADDKETCFAEEGKKLVAASQAALGL

SEQ ID NO: 407 - protein, 820 aa, Artificial Sequence
  Description of Artificial Sequence: Synthetic fusion protein
  MOD_RES (139)..(195): cysteine or serine
FVNQHLCGSHLVEALYLVCGERGFFYTPKTGSGSSSAAAPQTGIVEQCCTSICSLYQLENYCNGGGGSGGGGSRPSGRKSSKMQAFRIWDVNQKTFYLRNNQLVAGYLQGPNVNLEEKIDVVPIEPHALFLGIHGGKMXLSXVKSGDETRLQLEAVNITDLSENRKQDKRFAFIRSDSGPTTSFESAAXPGWFLXTAMEADQPVSLTNMPDEGVMVTKFYFQEDEGGGGSGGGGSDAHKSEVAHRFKDLGEENFKALVLIAFAQYLQQCPFEDHVKLVNEVTEFAKTCVADESAENCDKSLHTLFGDKLCTVATLRETYGEMADCCAKQEPERNECFLQHKDDNPNLPRLVRPEVDVMCTAFHDNEETFLKKYLYEIARRHPYFYAPELLFFAKRYKAAFTECCQAADKAACLLPKLDELRDEGKASSAKQRLKCASLQKFGERAFKAWAVARLSQRFPKAEFAEVSKLVTDLTKVHTECCHGDLLECADDRADLAKYICENQDSISSKLKECCEKPLLEKSHCIAEVENDEMPADLPSLAADFVESKDVCKNYAEAKDVFLGMFLYEYARRHPDYSVVLLLRLAKTYETTLEKCCAAADPHECYAKVFDEFKPLVEEPQNLIKQNCELFEQLGEYKFQNALLVRYTKKVPQVSTPTLVEVSRNLGKVGSKCCKHPEAKRMPCAEDYLSVVLNQLCVLHEKTPVSDRVTKCCTESLVNRRPCFSALEVDETYVPKEFNAETFTFHADICTLSEKERQIKKQTALVELVKHKPKATKEQLKAVMDDFAAFVEKCCKADDKETCFAEEGKKLVAASQAALGL

SEQ ID NO: 408 - protein, 849 aa, Artificial Sequence
  Description of Artificial Sequence: Synthetic fusion protein
  MOD_RES (1)..(1): methionine, cysteine, general formula 1, general formula 2 or absent
  MOD_RES (67)..(67): cysteine or serine
  MOD_RES (70)..(70): cysteine or serine
  MOD_RES (117)..(117): cysteine or serine
  MOD_RES (123)..(123): cysteine or serine
  MOD_RES (154)..(183): "GGGGS" is repeated for 0, 1, 2, 3, 4, 5 or 6 times
  MOD_RES (769)..(798): "GGGGS" is repeated for 0, 1, 2, 3, 4, 5 or 6 times
  MOD_RES (828)..(829): T828 and G829 are linked by CL
XRPSGRKSSKMQAFRIWDVNQKTFYLRNNQLVAGYLQGPNVNLEEKIDVVPIEPHALFLGIHGGKMXLSXVKSGDETRLQLEAVNITDLSENRKQDKRFAFIRSDSGPTTSFESAAXPGWFLXTAMEADQPVSLTNMPDEGVMVTKFYFQEDEGGGGSGGGGSGGGGSGGGGSGGGGSGGGGSDAHKSEVAHRFKDLGEENFKALVLIAFAQYLQQCPFEDHVKLVNEVTEFAKTCVADESAENCDKSLHTLFGDKLCTVATLRETYGEMADCCAKQEPERNECFLQHKDDNPNLPRLVRPEVDVMCTAFHDNEETFLKKYLYEIARRHPYFYAPELLFFAKRYKAAFTECCQAADKAACLLPKLDELRDEGKASSAKQRLKCASLQKFGERAFKAWAVARLSQRFPKAEFAEVSKLVTDLTKVHTECCHGDLLECADDRADLAKYICENQDSISSKLKECCEKPLLEKSHCIAEVENDEMPADLPSLAADFVESKDVCKNYAEAKDVFLGMFLYEYARRHPDYSVVLLLRLAKTYETTLEKCCAAADPHECYAKVFDEFKPLVEEPQNLIKQNCELFEQLGEYKFQNALLVRYTKKVPQVSTPTLVEVSRNLGKVGSKCCKHPEAKRMPCAEDYLSVVLNQLCVLHEKTPVSDRVTKCCTESLVNRRPCFSALEVDETYVPKEFNAETFTFHADICTLSEKERQIKKQTALVELVKHKPKATKEQLKAVMDDFAAFVEKCCKADDKETCFAEEGKKLVAASQAALGLGGGGSGGGGSGGGGSGGGGSGGGGSGGGGSFVNQHLCGSHLVEALYLVCGERGFFYTPKTGIVEQCCTSICSLYQLENYCN

SEQ ID NO: 409 - protein, 849 aa, Artificial Sequence
  Description of Artificial Sequence: Synthetic fusion protein
  MOD_RES (1)..(1): methionine, cysteine, general formula 1, general formula 2 or absent
  MOD_RES (67)..(67): cysteine or serine
  MOD_RES (70)..(70): cysteine or serine
  MOD_RES (117)..(117): cysteine or serine
  MOD_RES (123)..(123): cysteine or serine
  MOD_RES (154)..(183): "GGGGS" is repeated for 0, 1, 2, 3, 4, 5 or 6 times
  MOD_RES (213)..(214): T214 and G213 are linked by CL
  MOD_RES (235)..(264): "GGGGS" is repeated for 0, 1, 2, 3, 4, 5 or 6 times
XRPSGRKSSKMQAFRIWDVNQKTFYLRNNQLVAGYLQGPNVNLEEKIDVVPIEPHALFLGIHGGKMXLSXVKSGDETRLQLEAVNITDLSENRKQDKRFAFIRSDSGPTTSFESAAXPGWFLXTAMEADQPVSLTNMPDEGVMVTKFYFQEDEGGGGSGGGGSGGGGSGGGGSGGGGSGGGGSFVNQHLCGSHLVEALYLVCGERGFFYTPKTGIVEQCCTSICSLYQLENYCNGGGGSGGGGSGGGGSGGGGSGGGGSGGGGSDAHKSEVAHRFKDLGEENFKALVLIAFAQYLQQCPFEDHVKLVNEVTEFAKTCVADESAENCDKSLHTLFGDKLCTVATLRETYGEMADCCAKQEPERNECFLQHKDDNPNLPRLVRPEVDVMCTAFHDNEETFLKKYLYEIARRHPYFYAPELLFFAKRYKAAFTECCQAADKAACLLPKLDELRDEGKASSAKQRLKCASLQKFGERAFKAWAVARLSQRFPKAEFAEVSKLVTDLTKVHTECCHGDLLECADDRADLAKYICENQDSISSKLKECCEKPLLEKSHCIAEVENDEMPADLPSLAADFVESKDVCKNYAEAKDVFLGMFLYEYARRHPDYSVVLLLRLAKTYETTLEKCCAAADPHECYAKVFDEFKPLVEEPQNLIKQNCELFEQLGEYKFQNALLVRYTKKVPQVSTPTLVEVSRNLGKVGSKCCKHPEAKRMPCAEDYLSVVLNQLCVLHEKTPVSDRVTKCCTESLVNRRPCFSALEVDETYVPKEFNAETFTFHADICTLSEKERQIKKQTALVELVKHKPKATKEQLKAVMDDFAAFVEKCCKADDKETCFAEEGKKLVAASQAALGL

SEQ ID NO: 410 - protein, 153 aa, Artificial Sequence
  Description of Artificial Sequence: Synthetic fusion protein
  MOD_RES (1)..(1): methionine, cysteine, general formula 1, general formula 2 or absent
  MOD_RES (1)..(1): UL-
  MOD_RES (67)..(123): cysteine or serine
  MOD_RES (117)..(117): linking group-insulin receptor binding polypeptide
XRPSGRKSSKMQAFRIWDVNQKTFYLRNNQLVAGYLQGPNVNLEEKIDVVPIEPHALFLGIHGGKMXLSXVKSGDETRLQLEAVNITDLSENRKQDKRFAFIRSDSGPTTSFESAACPGWFLXTAMEADQPVSLTNMPDEGVMVTKFYFQEDE

SEQ ID NO: 411 - protein, 153 aa, Artificial Sequence
  Description of Artificial Sequence: Synthetic fusion protein
  MOD_RES (1)..(1): methionine, cysteine, general formula 1, general formula 2 or absent
  MOD_RES (1)..(1): UL-
  MOD_RES (67)..(123): cysteine or serine
  MOD_RES (85)..(85): linking group-insulin receptor binding polypeptide
XRPSGRKSSKMQAFRIWDVNQKTFYLRNNQLVAGYLQGPNVNLEEKIDVVPIEPHALFLGIHGGKMXLSXVKSGDETRLQLEAVCITDLSENRKQDKRFAFIRSDSGPTTSFESAASPGWFLXTAMEADQPVSLTNMPDEGVMVTKFYFQEDE

SEQ ID NO: 412 - protein, 154 aa, Artificial Sequence; identical to SEQ ID NO: 377
  Description of Artificial Sequence: Synthetic fusion protein
  MOD_RES (1)..(1): cysteine or absent
  MOD_RES (1)..(1): insulin receptor binding polypeptide - linking group
  MOD_RES (2)..(2): methionine, cysteine, general formula 1, general formula 2 or absent
  MOD_RES (68)..(71): cysteine or serine
  MOD_RES (86)..(86): cysteine or asparagine
  MOD_RES (118)..(124): cysteine or serine

SEQ ID NO: 413 - protein, 154 aa, Artificial Sequence
  Description of Artificial Sequence: Synthetic fusion protein
  MOD_RES (1)..(1): methionine, cysteine, general formula 1, general formula 2 or absent
  MOD_RES (1)..(1): UL-
  MOD_RES (67)..(70): cysteine or serine
  MOD_RES (85)..(85): cysteine or asparagine
  MOD_RES (117)..(123): cysteine or serine
  MOD_RES (154)..(154): linking group-insulin receptor binding polypeptide
XRPSGRKSSKMQAFRIWDVNQKTFYLRNNQLVAGYLQGPNVNLEEKIDVVPIEPHALFLGIHGGKMXLSXVKSGDETRLQLEAVXITDLSENRKQDKRFAFIRSDSGPTTSFESAAXPGWFLXTAMEADQPVSLTNMPDEGVMVTKFYFQEDEC

SEQ ID NO: 414 - protein, 49 aa, Unknown; identical to SEQ ID NO: 383
  Description of Unknown: single-chain insulin receptor binding polypeptide
  MOD_RES (1)..(1): a tetrapeptide of phenylalanine-valine-asparagine-glutamine, a tripeptide of valine-asparagine-glutamine, a dipeptide of asparagine-glutamine, glutamine, a sequence wherein any one of the amino acid residues in the sequence of the
  MOD_RES (1)..(1): tetrapeptide,tripeptide, and dipeptide is substituted with a lysine or arginine, or absent
  MOD_RES (1)..(1): UL-
  MOD_RES (7)..(7): histidine, phenylalanine, arginine, or glutamine
  MOD_RES (19)..(19): arginine, alanine, glutamic acid, or aspartic acid
  MOD_RES (22)..(22): phenylalanine, tyrosine, or histidine
  MOD_RES (23)..(23): tyrosine, phenylalanine, or absent
  MOD_RES (24)..(24): threonine, asparagine, or absent
  MOD_RES (25)..(25): proline, lysine, glutamic acid, aspartic acid, or absent
  MOD_RES (26)..(26): lysine, proline, arginine, glutamic acid, aspartic acid or absent
  MOD_RES (27)..(27): threonine, or absent
  MOD_RES (27)..(28): Xaa27 and G28 are linked by CL
  MOD_RES (35)..(35): threonine, histidine, or arginine
  MOD_RES (48)..(48): alanine, glycine, or asparagine
  MOD_RES (49)..(49): lysine, a dipeptide of arginine-lysine, or absent

SEQ ID NO: 415 - protein, 49 aa, Unknown
  Description of Unknown: single-chain insulin receptor binding polypeptide
  MOD_RES (1)..(1): a tetrapeptide of phenylalanine-valine-asparagine-glutamine, a tripeptide of valine-asparagine-glutamine, a dipeptide of asparagine-glutamine, glutamine, a sequence wherein any one of the amino acid residues in the sequence of the
  MOD_RES (1)..(1): tetrapeptide,tripeptide, and dipeptide is substituted with a lysine or arginine, or absent
  MOD_RES (1)..(1): UL-
  MOD_RES (22)..(22): phenylalanine, tyrosine, or histidine
  MOD_RES (23)..(23): tyrosine, phenylalanine, or absent
  MOD_RES (24)..(24): threonine, asparagine, or absent
  MOD_RES (25)..(25): proline, lysine, glutamic acid, aspartic acid, or absent
  MOD_RES (26)..(26): lysine, proline, arginine, glutamic acid, aspartic acid or absent
  MOD_RES (27)..(27): threonine, or absent
  MOD_RES (27)..(28): Xaa27  and G28 are linked by CL
  MOD_RES (48)..(48): alanine, glycine, or asparagine
  MOD_RES (49)..(49): lysine, a dipeptide of arginine-lysine, or absent
XHLCGSHLVEALYLVCGERGFXXXXXXGIVEQCCTSICSLYQLENYCXX

SEQ ID NO: 416 - protein, 51 aa, Unknown
  Description of Unknown: single-chain insulin receptor binding polypeptide
  MOD_RES (1)..(1): UL-
  MOD_RES (29)..(29): lysine, proline, arginine, glutamic acid, aspartic acid or absent
  MOD_RES (30)..(31): T30 and G31 are linked by CL
FVNQHLCGSHLVEALYLVCGERGFFYTPXTGIVEQCCTSICSLYQLENYCN

SEQ ID NO: 417 - protein, 63 aa, Unknown
  Description of Unknown: single-chain insulin receptor binding polypeptide
  MOD_RES (1)..(1): UL-
  MOD_RES (29)..(29): lysine, proline, arginine, glutamic acid, aspartic acid or absent
FVNQHLCGSHLVEALYLVCGERGFFYTPXTGKGSSSAAAPQTGIVEQCCTSICSLYQLENYCN

SEQ ID NO: 418 - protein, 63 aa, Unknown
  Description of Unknown: single-chain insulin receptor binding polypeptide
  MOD_RES (1)..(1): UL-
  MOD_RES (29)..(29): lysine, proline, arginine, glutamic acid, aspartic acid or absent
FVNQHLCGSHLVEALYLVCGERGFFYTPXTGSGKSSAAAPQTGIVEQCCTSICSLYQLENYCN

SEQ ID NO: 419 - protein, 63 aa, Unknown
  Description of Unknown: single-chain insulin receptor binding polypeptide
  MOD_RES (1)..(1): UL-
  MOD_RES (29)..(29): lysine, proline, arginine, glutamic acid, aspartic acid or absent
FVNQHLCGSHLVEALYLVCGERGFFYTPXTGSGSKSAAAPQTGIVEQCCTSICSLYQLENYCN

SEQ ID NO: 420 - protein, 63 aa, Unknown
  Description of Unknown: single-chain insulin receptor binding polypeptide
  MOD_RES (1)..(1): UL-
  MOD_RES (29)..(29): lysine, proline, arginine, glutamic acid, aspartic acid or absent
FVNQHLCGSHLVEALYLVCGERGFFYTPXTGSGSSKAAAPQTGIVEQCCTSICSLYQLENYCN

SEQ ID NO: 421 - protein, 63 aa, Unknown
  Description of Unknown: single-chain insulin receptor binding polypeptide
  MOD_RES (1)..(1): UL-
  MOD_RES (29)..(29): lysine, proline, arginine, glutamic acid, aspartic acid or absent
FVNQHLCGSHLVEALYLVCGERGFFYTPXTGSGSSSKAAPQTGIVEQCCTSICSLYQLENYCN

SEQ ID NO: 422 - protein, 63 aa, Unknown
  Description of Unknown: single-chain insulin receptor binding polypeptide
  MOD_RES (1)..(1): UL-
  MOD_RES (29)..(29): lysine, proline, arginine, glutamic acid, aspartic acid or absent
FVNQHLCGSHLVEALYLVCGERGFFYTPXTGSGSSSAKAPQTGIVEQCCTSICSLYQLENYCN

SEQ ID NO: 423 - protein, 63 aa, Unknown
  Description of Unknown: single-chain insulin receptor binding polypeptide
  MOD_RES (1)..(1): UL-
  MOD_RES (29)..(29): lysine, proline, arginine, glutamic acid, aspartic acid or absent
FVNQHLCGSHLVEALYLVCGERGFFYTPXTGSGSSSAAKPQTGIVEQCCTSICSLYQLENYCN

SEQ ID NO: 424 - protein, 64 aa, Unknown
  Description of Unknown: single-chain insulin receptor binding polypeptide
  MOD_RES (1)..(1): UL-
  MOD_RES (29)..(29): lysine, proline, arginine, glutamic acid, aspartic acid or absent
FVNQHLCGSHLVEALYLVCGERGFFYTPXTGSGSSSAAAPQTGIVEQCCTSICSLYQLENYCNK

SEQ ID NO: 425 - protein, 63 aa, Unknown
  Description of Unknown: single-chain insulin receptor binding polypeptide
  MOD_RES (29)..(29): lysine, proline, arginine, glutamic acid, aspartic acid or absent
FVNQHLCGSHLVEALYLVCGERGFFYTPXTGSGSSSAAAPQTGIVEQCCTSICSLYQLENYCN

SEQ ID NO: 426 - protein, 58 aa, Unknown
  Description of Unknown: single-chain insulin receptor binding polypeptide
  MOD_RES (1)..(1): UL-
FVNQHLCGSHLVEALYLVCGERGFFGSGSSSAAKPQTGIVEQCCTSICSLYQLENYCN

SEQ ID NO: 427 - protein, 58 aa, Unknown; identical to SEQ ID NO: 139
  Description of Unknown: single-chain insulin receptor binding polypeptide
  MOD_RES (1)..(1): UL-

SEQ ID NO: 428 - protein, 58 aa, Unknown
  Description of Unknown: single-chain insulin receptor binding polypeptide
  MOD_RES (1)..(1): UL-
FVNQHLCGSHLVEALYLVCGERGFFGSGSSSKAAPQTGIVEQCCTSICSLYQLENYCN

SEQ ID NO: 429 - protein, 59 aa, Unknown
  Description of Unknown: single-chain insulin receptor binding polypeptide
  MOD_RES (1)..(1): UL-
FVNQHLCGSHLVEALYLVCGERGFFGSGSSSAAAPQTGIVEQCCTSICSLYQLENYCNK

SEQ ID NO: 430 - protein, 58 aa, Unknown
  Description of Unknown: single-chain insulin receptor binding polypeptide
FVNQHLCGSHLVEALYLVCGERGFFGSGSSSAAAPQTGIVEQCCTSICSLYQLENYCN

SEQ ID NO: 431 - protein, 152 aa, Unknown
  Description of Unknown: interleukin-1 receptor antagonistic protein
  MOD_RES (1)..(1): UL-
  MOD_RES (66)..(69): cysteine or serine
  MOD_RES (84)..(84): cysteine or asparagine
  MOD_RES (116)..(122): cysteine or serine
RPSGRKSSKMQAFRIWDVNQKTFYLRNNQLVAGYLQGPNVNLEEKIDVVPIEPHALFLGIHGGKMXLSXVKSGDETRLQLEAVXITDLSENRKQDKRFAFIRSDSGPTTSFESAAXPGWFLXTAMEADQPVSLTNMPDEGVMVTKFYFQEDE

SEQ ID NO: 432 - protein, 153 aa, Unknown
  Description of Unknown: interleukin-1 receptor antagonistic protein
  MOD_RES (1)..(1): UL-
  MOD_RES (67)..(67): Xaa can be any naturally occurring amino acid
  MOD_RES (70)..(123): cysteine or serine
CRPSGRKSSKMQAFRIWDVNQKTFYLRNNQLVAGYLQGPNVNLEEKIDVVPIEPHALFLGIHGGKMXLSXVKSGDETRLQLEAVNITDLSENRKQDKRFAFIRSDSGPTTSFESAASPGWFLXTAMEADQPVSLTNMPDEGVMVTKFYFQEDE

SEQ ID NO: 433 - protein, 153 aa, Unknown
  Description of Unknown: interleukin-1 receptor antagonistic protein
  MOD_RES (1)..(1): UL-
  MOD_RES (66)..(122): cysteine or serine
RPSGRKSSKMQAFRIWDVNQKTFYLRNNQLVAGYLQGPNVNLEEKIDVVPIEPHALFLGIHGGKMXLSXVKSGDETRLQLEAVNITDLSENRKQDKRFAFIRSDSGPTTSFESAASPGWFLXTAMEADQPVSLTNMPDEGVMVTKFYFQEDEC

SEQ ID NO: 434 - protein, 152 aa, Artificial Sequence
  Description of Artificial Sequence: Synthetic fusion protein
  MOD_RES (1)..(1): insulin receptor binding polypeptide-linking group-
  MOD_RES (66)..(122): cysteine or serine
RPSGRKSSKMQAFRIWDVNQKTFYLRNNQLVAGYLQGPNVNLEEKIDVVPIEPHALFLGIHGGKMXLSXVKSGDETRLQLEAVNITDLSENRKQDKRFAFIRSDSGPTTSFESAAXPGWFLXTAMEADQPVSLTNMPDEGVMVTKFYFQEDE

SEQ ID NO: 435 - protein, 153 aa, Artificial Sequence; identical to SEQ ID NO: 432
  Description of Artificial Sequence: Synthetic fusion protein
  MOD_RES (1)..(1): insulin receptor binding polypeptide - linking group
  MOD_RES (67)..(123): cysteine or serine

SEQ ID NO: 436 - protein, 5 aa, Unknown
  Description of Unknown: short peptide of Lj
GGGGS

SEQ ID NO: 437 - protein, 10 aa, Unknown
  Description of Unknown: short peptide
GPSSGAPPPS

SEQ ID NO: 438 - protein, 9 aa, Unknown
  Description of Unknown: short peptide
PSSGAPPPS

SEQ ID NO: 439 - protein, 43 aa, Unknown
  Description of Unknown: GIP receptor binding polypeptide
  MOD_RES (1)..(1): tyrosine, N-acetyl tyrosine, pyroglutamyl-tyrosine, glucitol-tyrosine, D-histidine, alpha-2 methylimidazolyl acetic acid (DMIA), N-methylhistidine, alpha-methyl- histidine, imidazole acetic acid, deamino-histidine,
  MOD_RES (1)..(1): hydroxylhistidine, acetylhistidine, homohistidine, N-palmitic acid-tyrosine, N-Fmoc-tyrosine, or absent
  MOD_RES (1)..(5): Xaa1 to T5 are repeated for 0 or 1 time
  MOD_RES (2)..(2): alanine, D-alanine, D-serine, serine, valine, glycine, N-methylserine, N-methylalanine, 2-methylalanine, or absent
  MOD_RES (3)..(3): glutamic acid, hydroxyl proline, proline, or absent
  MOD_RES (6)..(6): phenylalanine, or absent
  MOD_RES (7)..(7): isoleucine, or threonine
  MOD_RES (10)..(10): tyrosine, tryptophan, phenylalanine, valine, lysine, ornithine, glutamic acid, leucine, general formula 1, or general formula 2
  MOD_RES (12)..(12): isoleucine, serine, lysine, arginine, general formula 1, or general formula 2
  MOD_RES (13)..(13): alanine, glutamine, or tyrosine
  MOD_RES (14)..(14): methionine or leucine
  MOD_RES (16)..(16): lysine, arginine, serine, glutamic acid, glutamine, homo-glutamic acid, homoecysteine, threonine, glycine, 2-methylalanine, general formula 1, or general formula 2
  MOD_RES (17)..(17): isoleucine, glutamine, glutamic acid, arginine, general formula 1, or general formula 2
  MOD_RES (18)..(18): histidine, alanine, arginine, serine, threonine, or glycine
  MOD_RES (20)..(20): glutamine, lysine, alanine, serine, threonine, citrulline, arginine, ornithine, 2-methylalanine, other alpha,alpha- disubtituted amino acids, general formula 1, or general formula 2
  MOD_RES (21)..(21): aspartic acid, glutamic acid, homo-glutamic acid, homoecysteine, leucine, general formula 1, or general formula 2
  MOD_RES (23)..(23): valine, or isoleucine
  MOD_RES (24)..(24): glutamine, glutamic acid, asparagine, alanine, serine, threonine, 2-methylalanine, general formula 1, or general formula 2
  MOD_RES (27)..(27): leucine, isoleucine, norleucine, lysine, valine, methionine, general formula 1, or general formula 2
  MOD_RES (28)..(28): glycine, alanine, lysine, asparagine, general formula 1, or general formula 2
  MOD_RES (29)..(29): glutamine, glycine, threonine, alanine, general formula 1, or general formula 2
  MOD_RES (30)..(30): lysine, arginine, glycine, general formula 1, or general formula 2
  MOD_RES (31)..(31): -NH2, glycine, proline, or absent
  MOD_RES (32)..(32): lysine, arginine, serine, general formula 1, general formula 2, or absent
  MOD_RES (33)..(33): lysine, arginine, serine, general formula 1, general formula 2, or absent
  MOD_RES (34)..(34): asparagine, glycine, or absent
  MOD_RES (35)..(35): asparagine, alanine, or absent
  MOD_RES (36)..(36): tryptophan, proline, or absent
  MOD_RES (37)..(37): lysine, arginine, proline, general formula 1, general formula 2, or absent
  MOD_RES (38)..(38): histidine, proline, or absent
  MOD_RES (39)..(39): asparagine, serine, or absent
  MOD_RES (40)..(40): isoleucine,-NH2, general formula 1, general formula 2, or absent
  MOD_RES (41)..(41): threonine or absent
  MOD_RES (42)..(42): glutamine or absent
  MOD_RES (43)..(43): lysine, cysteine, PSSGAPPPS, general formula 3, general formula 4, or absent
XXXGTXXSDXSXXXDXXXQXXFXXWLXXXXXXXXXXXXXXXXX

SEQ ID NO: 440 - protein, 10 aa, Unknown
  Description of Unknown: short peptide
  MOD_RES (1)..(1): formula 1 or formula 2
XPSSGAPPPS

SEQ ID NO: 441 - protein, 9 aa, Unknown
  Description of Unknown: short peptide
  MOD_RES (9)..(9): formula 1 or formula 2
  MOD_RES (9)..(9): NH2-
PSSGAPPPX

SEQ ID NO: 442 - protein, 10 aa, Unknown
  Description of Unknown: short peptide
  MOD_RES (10)..(10): formula 1 or formula 2
  MOD_RES (10)..(10): NH2-
PSSGAPPPSX

SEQ ID NO: 443 - protein, 196 aa, Artificial Sequence
  Description of Artificial Sequence: Synthetic fusion protein
  MOD_RES (1)..(1): tyrosine, N-acetyl tyrosine, pyroglutamyl-tyrosine, glucitol-tyrosine, D-histidine, alpha-2 methylimidazolyl acetic acid (DMIA), N-methylhistidine, alpha-methylhistidine, imidazole acetic acid, deamino-histidine, hydroxylhistidine,
  MOD_RES (1)..(1): acetylhistidine, homohistidine, N-palmitic acid-tyrosine, N-Fmoc-tyrosine, or absent
  MOD_RES (1)..(5): Xaa1 to T5 are repeated for 0 or 1 time
  MOD_RES (1)..(1): UL-
  MOD_RES (2)..(2): alanine, D-alanine, D-serine, serine, valine, glycine, N-methylserine, N-methylalanine, 2-methylalanine, or absent
  MOD_RES (3)..(3): glutamic acid, hydroxyl proline, proline, or absent
  MOD_RES (6)..(6): phenylalanine, or absent
  MOD_RES (7)..(7): isoleucine, or threonine
  MOD_RES (10)..(10): tyrosine, tryptophan, phenylalanine, valine, lysine, ornithine, glutamic acid, leucine, general formula 1, or general formula 2
  MOD_RES (12)..(12): isoleucine, serine, lysine, arginine, general formula 1, or general formula 2
  MOD_RES (13)..(13): alanine, glutamine, or tyrosine
  MOD_RES (14)..(14): methionine or leucine
  MOD_RES (16)..(16): lysine, arginine, serine, glutamic acid, glutamine, homo-glutamic acid, homoecysteine, threonine, glycine, 2-methylalanine, general formula 1, or general formula 2
  MOD_RES (17)..(17): isoleucine, glutamine, glutamic acid, arginine, general formula 1, or general formula 2
  MOD_RES (18)..(18): histidine, alanine, arginine, serine, threonine, or glycine
  MOD_RES (20)..(20): glutamine, lysine, alanine, serine, threonine, citrulline, arginine, ornithine, 2-methylalanine, other alpha,alpha- disubtituted amino acids, general formula 1, or general formula 2
  MOD_RES (21)..(21): aspartic acid, glutamic acid, homo-glutamic acid, homoecysteine, leucine, general formula 1, or general formula 2
  MOD_RES (23)..(23): valine, or isoleucine
  MOD_RES (24)..(24): glutamine, glutamic acid, asparagine, alanine, serine, threonine, 2-methylalanine, general formula 1, or general formula 2
  MOD_RES (27)..(27): leucine, isoleucine, norleucine, lysine, valine, methionine, general formula 1, or general formula 2
  MOD_RES (28)..(28): glycine, alanine, lysine, asparagine, general formula 1, or general formula 2
  MOD_RES (29)..(29): glutamine, glycine, threonine, alanine, general formula 1, or general formula 2
  MOD_RES (30)..(30): lysine, arginine, glycine, general formula 1, or general formula 2
  MOD_RES (31)..(31): -NH2, glycine, proline, or absent
  MOD_RES (32)..(32): lysine, arginine, serine, general formula 1, general formula 2, or absent
  MOD_RES (33)..(33): lysine, arginine, serine, general formula 1, general formula 2, or absent
  MOD_RES (34)..(34): asparagine, glycine, or absent
  MOD_RES (35)..(35): asparagine, alanine, or absent
  MOD_RES (36)..(36): tryptophan, proline, or absent
  MOD_RES (37)..(37): lysine, arginine, proline, general formula 1, general formula 2, or absent
  MOD_RES (38)..(38): histidine, proline, or absent
  MOD_RES (39)..(39): asparagine, serine, or absent
  MOD_RES (40)..(40): isoleucine,-NH2, general formula 1, general formula 2, or absent
  MOD_RES (41)..(41): threonine or absent
  MOD_RES (42)..(42): glutamine or absent
  MOD_RES (43)..(43): lysine, cysteine, PSSGAPPPS, general formula 3, general formula 4, or absent
  MOD_RES (43)..(44): Xaa43 and Xaa44 are linked by Lj
  MOD_RES (44)..(44): methionine, cysteine, general formula 1, general formula 2 or absent
  MOD_RES (110)..(113): cysteine or serine
  MOD_RES (128)..(128): cysteine or asparagine
  MOD_RES (160)..(166): cysteine or serine
XXXGTXXSDXSXXXDXXXQXXFXXWLXXXXXXXXXXXXXXXXXXRPSGRKSSKMQAFRIWDVNQKTFYLRNNQLVAGYLQGPNVNLEEKIDVVPIEPHALFLGIHGGKMXLSXVKSGDETRLQLEAVXITDLSENRKQDKRFAFIRSDSGPTTSFESAAXPGWFLXTAMEADQPVSLTNMPDEGVMVTKFYFQEDE

SEQ ID NO: 444 - protein, 264 aa, Artificial Sequence
  Description of Artificial Sequence: Synthetic fusion protein
  MOD_RES (1)..(1): tyrosine, N-acetyl tyrosine, pyroglutamyl-tyrosine, glucitol-tyrosine, D-histidine, alpha-2 methylimidazolyl acetic acid (DMIA), N-methylhistidine, alpha-methylhistidine, imidazole acetic acid, deamino-histidine, hydroxylhistidine,
  MOD_RES (1)..(1): acetylhistidine, homohistidine, N-palmitic acid-tyrosine, N-Fmoc-tyrosine, or absent
  MOD_RES (1)..(5): Xaa1 to T5 are repeated for 0 or 1 time
  MOD_RES (1)..(1): UL-
  MOD_RES (2)..(2): alanine, D-alanine, D-serine, serine, valine, glycine, N-methylserine, N-methylalanine, 2-methylalanine, or absent
  MOD_RES (3)..(3): glutamic acid, hydroxyl proline, proline, or absent
  MOD_RES (6)..(6): phenylalanine, or absent
  MOD_RES (10)..(10): tyrosine, tryptophan, phenylalanine, valine, lysine, ornithine, glutamic acid, leucine, general formula 1, or general formula 2
  MOD_RES (12)..(12): isoleucine, serine, lysine, arginine, general formula 1, or general formula 2
  MOD_RES (16)..(16): lysine, arginine, serine, glutamic acid, glutamine, homo-glutamic acid, homoecysteine, threonine, glycine, 2-methylalanine, general formula 1, or general formula 2
  MOD_RES (27)..(27): leucine, isoleucine, norleucine, lysine, valine, methionine, general formula 1, or general formula 2
  MOD_RES (28)..(28): glycine, alanine, lysine, asparagine, general formula 1, or general formula 2
  MOD_RES (30)..(30): lysine, arginine, glycine, general formula 1, or general formula 2
  MOD_RES (31)..(42): P43 to S51 are repeated for 0 or 1 time
  MOD_RES (32)..(32): lysine, arginine, serine, general formula 1, general formula 2, or absent
  MOD_RES (33)..(33): lysine, arginine, serine, general formula 1, general formula 2, or absent
  MOD_RES (37)..(37): lysine, arginine, proline, general formula 1, general formula 2, or absent
  MOD_RES (43)..(51): P43 to S51 are repeated for 0 or 1 time
  MOD_RES (52)..(81): "GGGGS" is repeated for 0, 1, 2, 3, 4, 5 or 6 times
  MOD_RES (82)..(82): cysteine, lysine, absent, general formula 1, or general formula 2
  MOD_RES (83)..(112): "GGGGS" is repeated for 0, 1, 2, 3, 4, 5 or 6 times
  MOD_RES (196)..(196): cysteine or asparagine
  MOD_RES (228)..(228): cysteine or serine
XXXGTXISDXSXAMDXIHQQDFVNWLXXQXGXXNDWXHNITQPSSGAPPPSGGGGSGGGGSGGGGSGGGGSGGGGSGGGGSXGGGGSGGGGSGGGGSGGGGSGGGGSGGGGSRPSGRKSSKMQAFRIWDVNQKTFYLRNNQLVAGYLQGPNVNLEEKIDVVPIEPHALFLGIHGGKMCLSCVKSGDETRLQLEAVXITDLSENRKQDKRFAFIRSDSGPTTSFESAAXPGWFLCTAMEADQPVSLTNMPDEGVMVTKFYFQEDE

SEQ ID NO: 445 - protein, 264 aa, Artificial Sequence
  Description of Artificial Sequence: Synthetic fusion protein
  MOD_RES (1)..(1): tyrosine, N-acetyl tyrosine, pyroglutamyl-tyrosine, glucitol-tyrosine, D-histidine, alpha-2 methylimidazolyl acetic acid (DMIA), N-methylhistidine, alpha-methylhistidine, imidazole acetic acid, deamino-histidine, hydroxylhistidine,
  MOD_RES (1)..(1): acetylhistidine, homohistidine, N-palmitic acid-tyrosine, N-Fmoc-tyrosine, or absent
  MOD_RES (1)..(1): UL-
  MOD_RES (2)..(2): alanine, D-alanine, D-serine, serine, valine, glycine, N-methylserine, N-methylalanine, 2-methylalanine, or absent
  MOD_RES (3)..(3): glutamic acid, hydroxyl proline, proline, or absent
  MOD_RES (31)..(42): G31 to Q42 are repeated for 0 or 1 time
  MOD_RES (43)..(51): P43 to S51 are repeated for 0 or 1 time
  MOD_RES (52)..(81): "GGGGS" is repeated for 0, 1, 2, 3, 4, 5 or 6 times
  MOD_RES (82)..(82): cysteine, lysine, absent, general formula 1, or general formula 2
  MOD_RES (83)..(112): "GGGGS" is repeated for 0, 1, 2, 3, 4, 5 or 6 times
  MOD_RES (196)..(196): cysteine or asparagine
  MOD_RES (228)..(228): cysteine or serine
XXXGTFISDYSIAMDKIHQQDFVNWLLAQKGKKNDWKHNITQPSSGAPPPSGGGGSGGGGSGGGGSGGGGSGGGGSGGGGSXGGGGSGGGGSGGGGSGGGGSGGGGSGGGGSRPSGRKSSKMQAFRIWDVNQKTFYLRNNQLVAGYLQGPNVNLEEKIDVVPIEPHALFLGIHGGKMCLSCVKSGDETRLQLEAVXITDLSENRKQDKRFAFIRSDSGPTTSFESAAXPGWFLCTAMEADQPVSLTNMPDEGVMVTKFYFQEDE

SEQ ID NO: 446 - protein, 259 aa, Artificial Sequence
  Description of Artificial Sequence: Synthetic fusion protein
  MOD_RES (1)..(1): phenylalanine, or absent
  MOD_RES (1)..(1): UL-
  MOD_RES (26)..(37): G26 to Q37 are repeated for 0 or 1 time
  MOD_RES (38)..(46): P38 to S46 are repeated for 0 or 1 time
  MOD_RES (47)..(76): "GGGGS" is repeated for 0, 1, 2, 3, 4, 5 or 6 times
  MOD_RES (77)..(77): cysteine, lysine, absent, general formula 1, or general formula 2
  MOD_RES (78)..(107): "GGGGS" is repeated for 0, 1, 2, 3, 4, 5 or 6 times
  MOD_RES (191)..(191): cysteine or asparagine
  MOD_RES (223)..(223): cysteine or serine
XISDYSIAMDKIHQQDFVNWLLAQKGKKNDWKHNITQPSSGAPPPSGGGGSGGGGSGGGGSGGGGSGGGGSGGGGSXGGGGSGGGGSGGGGSGGGGSGGGGSGGGGSRPSGRKSSKMQAFRIWDVNQKTFYLRNNQLVAGYLQGPNVNLEEKIDVVPIEPHALFLGIHGGKMCLSCVKSGDETRLQLEAVXITDLSENRKQDKRFAFIRSDSGPTTSFESAAXPGWFLCTAMEADQPVSLTNMPDEGVMVTKFYFQEDE

SEQ ID NO: 447 - protein, 848 aa, Artificial Sequence
  Description of Artificial Sequence: Synthetic fusion protein
  MOD_RES (1)..(1): tyrosine, N-acetyl tyrosine, pyroglutamyl-tyrosine, glucitol-tyrosine, D-histidine, alpha-2 methylimidazolyl acetic acid (DMIA), N-methylhistidine, alpha-methylhistidine, imidazole acetic acid, deamino-histidine, hydroxylhistidine,
  MOD_RES (1)..(1): acetylhistidine,homohistidine, N-palmitic acid-tyrosine, N-Fmoc-tyrosine,or absent
  MOD_RES (1)..(5): Xaa1 to T5 are repeated for 0 or 1 time
  MOD_RES (2)..(2): alanine, D-alanine, D-serine, serine, valine, glycine, N-methylserine, N-methylalanine, 2-methylalanine, or absent
  MOD_RES (3)..(3): glutamic acid, hydroxyl proline, proline, or absent
  MOD_RES (6)..(6): phenylalanine, or absent
  MOD_RES (31)..(42): G31 to Q42 are repeated for 0 or 1 time
  MOD_RES (43)..(51): P43 to S51 are repeated for 0 or 1 time
  MOD_RES (52)..(81): "GGGGS" is repeated for 0, 1, 2, 3, 4, 5 or 6 times
  MOD_RES (667)..(696): "GGGGS" is repeated for 0, 1, 2, 3, 4, 5 or 6 times
XXXGTXISDYSIAMDKIHQQDFVNWLLAQKGKKNDWKHNITQPSSGAPPPSGGGGSGGGGSGGGGSGGGGSGGGGSGGGGSDAHKSEVAHRFKDLGEENFKALVLIAFAQYLQQCPFEDHVKLVNEVTEFAKTCVADESAENCDKSLHTLFGDKLCTVATLRETYGEMADCCAKQEPERNECFLQHKDDNPNLPRLVRPEVDVMCTAFHDNEETFLKKYLYEIARRHPYFYAPELLFFAKRYKAAFTECCQAADKAACLLPKLDELRDEGKASSAKQRLKCASLQKFGERAFKAWAVARLSQRFPKAEFAEVSKLVTDLTKVHTECCHGDLLECADDRADLAKYICENQDSISSKLKECCEKPLLEKSHCIAEVENDEMPADLPSLAADFVESKDVCKNYAEAKDVFLGMFLYEYARRHPDYSVVLLLRLAKTYETTLEKCCAAADPHECYAKVFDEFKPLVEEPQNLIKQNCELFEQLGEYKFQNALLVRYTKKVPQVSTPTLVEVSRNLGKVGSKCCKHPEAKRMPCAEDYLSVVLNQLCVLHEKTPVSDRVTKCCTESLVNRRPCFSALEVDETYVPKEFNAETFTFHADICTLSEKERQIKKQTALVELVKHKPKATKEQLKAVMDDFAAFVEKCCKADDKETCFAEEGKKLVAASQAALGLGGGGSGGGGSGGGGSGGGGSGGGGSGGGGSRPSGRKSSKMQAFRIWDVNQKTFYLRNNQLVAGYLQGPNVNLEEKIDVVPIEPHALFLGIHGGKMCLSCVKSGDETRLQLEAVNITDLSENRKQDKRFAFIRSDSGPTTSFESAACPGWFLCTAMEADQPVSLTNMPDEGVMVTKFYFQEDE

SEQ ID NO: 448 - protein, 848 aa, Artificial Sequence
  Description of Artificial Sequence: Synthetic fusion protein
  MOD_RES (1)..(1): tyrosine, N-acetyl tyrosine, pyroglutamyl-tyrosine, glucitol-tyrosine, D-histidine, alpha-2 methylimidazolyl acetic acid (DMIA), N-methylhistidine, alpha-methylhistidine, imidazole acetic acid, deamino-histidine, hydroxylhistidine,
  MOD_RES (1)..(1): acetylhistidine, homohistidine, N-palmitic acid-tyrosine, N-Fmoc-tyrosine, or absent
  MOD_RES (1)..(5): Xaa1 to T5 are repeated for 0 or 1 time
  MOD_RES (2)..(2): alanine, D-alanine, D-serine, serine, valine, glycine, N-methylserine, N-methylalanine, 2-methylalanine, or absent
  MOD_RES (3)..(3): glutamic acid, hydroxyl proline, proline, or absent
  MOD_RES (6)..(6): phenylalanine, or absent
  MOD_RES (31)..(42): G31 to Q42 are repeated for 0 or 1 time
  MOD_RES (43)..(51): P43 to S51 are repeated for 0 or 1 time
  MOD_RES (52)..(81): "GGGGS" is repeated for 0, 1, 2, 3, 4, 5 or 6 times
  MOD_RES (234)..(263): "GGGGS" is repeated for 0, 1, 2, 3, 4, 5 or 6 times
XXXGTXISDYSIAMDKIHQQDFVNWLLAQKGKKNDWKHNITQPSSGAPPPSGGGGSGGGGSGGGGSGGGGSGGGGSGGGGSRPSGRKSSKMQAFRIWDVNQKTFYLRNNQLVAGYLQGPNVNLEEKIDVVPIEPHALFLGIHGGKMCLSCVKSGDETRLQLEAVNITDLSENRKQDKRFAFIRSDSGPTTSFESAACPGWFLCTAMEADQPVSLTNMPDEGVMVTKFYFQEDEGGGGSGGGGSGGGGSGGGGSGGGGSGGGGSDAHKSEVAHRFKDLGEENFKALVLIAFAQYLQQCPFEDHVKLVNEVTEFAKTCVADESAENCDKSLHTLFGDKLCTVATLRETYGEMADCCAKQEPERNECFLQHKDDNPNLPRLVRPEVDVMCTAFHDNEETFLKKYLYEIARRHPYFYAPELLFFAKRYKAAFTECCQAADKAACLLPKLDELRDEGKASSAKQRLKCASLQKFGERAFKAWAVARLSQRFPKAEFAEVSKLVTDLTKVHTECCHGDLLECADDRADLAKYICENQDSISSKLKECCEKPLLEKSHCIAEVENDEMPADLPSLAADFVESKDVCKNYAEAKDVFLGMFLYEYARRHPDYSVVLLLRLAKTYETTLEKCCAAADPHECYAKVFDEFKPLVEEPQNLIKQNCELFEQLGEYKFQNALLVRYTKKVPQVSTPTLVEVSRNLGKVGSKCCKHPEAKRMPCAEDYLSVVLNQLCVLHEKTPVSDRVTKCCTESLVNRRPCFSALEVDETYVPKEFNAETFTFHADICTLSEKERQIKKQTALVELVKHKPKATKEQLKAVMDDFAAFVEKCCKADDKETCFAEEGKKLVAASQAALGL

SEQ ID NO: 449 - protein, 899 aa, Artificial Sequence
  Description of Artificial Sequence: Synthetic fusion protein
  MOD_RES (1)..(1): tyrosine, N-acetyl tyrosine, pyroglutamyl-tyrosine, glucitol-tyrosine, D-histidine, alpha-2 methylimidazolyl acetic acid (DMIA), N-methylhistidine, alpha-methylhistidine, imidazole acetic acid, deamino-histidine, hydroxylhistidine,
  MOD_RES (1)..(1): acetylhistidine, homohistidine, N-palmitic acid-tyrosine, N-Fmoc-tyrosine, or absent
  MOD_RES (1)..(5): Xaa1 to T5 are repeated for 0 or 1 time
  MOD_RES (2)..(2): alanine, D-alanine, D-serine, serine, valine, glycine, N-methylserine, N-methylalanine, 2-methylalanine, or absent
  MOD_RES (3)..(3): glutamic acid, hydroxyl proline, proline, or absent
  MOD_RES (6)..(6): phenylalanine, or absent
  MOD_RES (31)..(42): G31 to Q42 are repeated for 0 or 1 time
  MOD_RES (43)..(51): P43 to S51 are repeated for 0 or 1 time
  MOD_RES (52)..(52): tyrosine, N-acetyl tyrosine, pyroglutamyl-tyrosine, glucitol-tyrosine, D-histidine, alpha-2 methylimidazolyl acetic acid (DMIA), N-methylhistidine, alpha-methylhistidine, imidazole acetic acid, deamino-histidine, hydroxylhistidine,
  MOD_RES (52)..(52): acetylhistidine, homohistidine, N-palmitic acid-tyrosine, N-Fmoc-tyrosine, or absent
  MOD_RES (52)..(56): Xaa52 to T56 are repeated for 0 or 1 time
  MOD_RES (53)..(53): alanine, D-alanine, D-serine, serine, valine, glycine, N-methylserine, N-methylalanine, 2-methylalanine, or absent
  MOD_RES (54)..(54): glutamic acid, hydroxyl proline, proline, or absent
  MOD_RES (57)..(57): phenylalanine, or absent
  MOD_RES (82)..(93): G82 to Q93 are repeated for 0 or 1 time
  MOD_RES (94)..(102): P94 to S102 are repeated for 0 or 1 time
  MOD_RES (103)..(132): "GGGGS" is repeated for 0, 1, 2, 3, 4, 5 or 6 times
  MOD_RES (285)..(314): "GGGGS" is repeated for 0, 1, 2, 3, 4, 5 or 6 times
XXXGTXISDYSIAMDKIHQQDFVNWLLAQKGKKNDWKHNITQPSSGAPPPSXXXGTXISDYSIAMDKIHQQDFVNWLLAQKGKKNDWKHNITQPSSGAPPPSGGGGSGGGGSGGGGSGGGGSGGGGSGGGGSRPSGRKSSKMQAFRIWDVNQKTFYLRNNQLVAGYLQGPNVNLEEKIDVVPIEPHALFLGIHGGKMCLSCVKSGDETRLQLEAVNITDLSENRKQDKRFAFIRSDSGPTTSFESAACPGWFLCTAMEADQPVSLTNMPDEGVMVTKFYFQEDEGGGGSGGGGSGGGGSGGGGSGGGGSGGGGSDAHKSEVAHRFKDLGEENFKALVLIAFAQYLQQCPFEDHVKLVNEVTEFAKTCVADESAENCDKSLHTLFGDKLCTVATLRETYGEMADCCAKQEPERNECFLQHKDDNPNLPRLVRPEVDVMCTAFHDNEETFLKKYLYEIARRHPYFYAPELLFFAKRYKAAFTECCQAADKAACLLPKLDELRDEGKASSAKQRLKCASLQKFGERAFKAWAVARLSQRFPKAEFAEVSKLVTDLTKVHTECCHGDLLECADDRADLAKYICENQDSISSKLKECCEKPLLEKSHCIAEVENDEMPADLPSLAADFVESKDVCKNYAEAKDVFLGMFLYEYARRHPDYSVVLLLRLAKTYETTLEKCCAAADPHECYAKVFDEFKPLVEEPQNLIKQNCELFEQLGEYKFQNALLVRYTKKVPQVSTPTLVEVSRNLGKVGSKCCKHPEAKRMPCAEDYLSVVLNQLCVLHEKTPVSDRVTKCCTESLVNRRPCFSALEVDETYVPKEFNAETFTFHADICTLSEKERQIKKQTALVELVKHKPKATKEQLKAVMDDFAAFVEKCCKADDKETCFAEEGKKLVAASQAALGL

SEQ ID NO: 450 - protein, 899 aa, Artificial Sequence
  Description of Artificial Sequence: Synthetic fusion protein
  MOD_RES (1)..(1): tyrosine, N-acetyl tyrosine, pyroglutamyl-tyrosine, glucitol-tyrosine, D-histidine, alpha-2 methylimidazolyl acetic acid (DMIA), N-methylhistidine, alpha-methylhistidine, imidazole acetic acid, deamino-histidine, hydroxylhistidine,
  MOD_RES (1)..(1): acetylhistidine, homohistidine, N-palmitic acid-tyrosine, N-Fmoc-tyrosine, or absent
  MOD_RES (1)..(5): Xaa1 to T5 are repeated for 0 or 1 time
  MOD_RES (2)..(2): alanine, D-alanine, D-serine, serine, valine, glycine, N-methylserine, N-methylalanine, 2-methylalanine, or absent
  MOD_RES (3)..(3): glutamic acid, hydroxyl proline, proline, or absent
  MOD_RES (6)..(6): phenylalanine, or absent
  MOD_RES (31)..(42): G31 to Q42 are repeated for 0 or 1 time
  MOD_RES (43)..(51): P43 to S51 are repeated for 0 or 1 time
  MOD_RES (52)..(52): tyrosine, N-acetyl tyrosine, pyroglutamyl-tyrosine, glucitol-tyrosine, D-histidine, alpha-2 methylimidazolyl acetic acid (DMIA), N-methylhistidine, alpha-methylhistidine, imidazole acetic acid, deamino-histidine, hydroxylhistidine,
  MOD_RES (52)..(52): acetylhistidine,
  MOD_RES (52)..(56): Xaa52 to T56 are repeated for 0 or 1 time
  MOD_RES (53)..(53): alanine, D-alanine, D-serine, serine, valine, glycine, N-methylserine, N-methylalanine, 2-methylalanine, or absent
  MOD_RES (54)..(54): glutamic acid, hydroxyl proline, proline, or absent
  MOD_RES (57)..(57): phenylalanine, or absent
  MOD_RES (82)..(93): G82 to Q93 are repeated for 0 or 1 time
  MOD_RES (94)..(102): P94 to S102 are repeated for 0 or 1 time
  MOD_RES (103)..(132): "GGGGS" is repeated for 0, 1, 2, 3, 4, 5 or 6 times
  MOD_RES (718)..(747): "GGGGS" is repeated for 0, 1, 2, 3, 4, 5 or 6 times
XXXGTXISDYSIAMDKIHQQDFVNWLLAQKGKKNDWKHNITQPSSGAPPPSXXXGTXISDYSIAMDKIHQQDFVNWLLAQKGKKNDWKHNITQPSSGAPPPSGGGGSGGGGSGGGGSGGGGSGGGGSGGGGSDAHKSEVAHRFKDLGEENFKALVLIAFAQYLQQCPFEDHVKLVNEVTEFAKTCVADESAENCDKSLHTLFGDKLCTVATLRETYGEMADCCAKQEPERNECFLQHKDDNPNLPRLVRPEVDVMCTAFHDNEETFLKKYLYEIARRHPYFYAPELLFFAKRYKAAFTECCQAADKAACLLPKLDELRDEGKASSAKQRLKCASLQKFGERAFKAWAVARLSQRFPKAEFAEVSKLVTDLTKVHTECCHGDLLECADDRADLAKYICENQDSISSKLKECCEKPLLEKSHCIAEVENDEMPADLPSLAADFVESKDVCKNYAEAKDVFLGMFLYEYARRHPDYSVVLLLRLAKTYETTLEKCCAAADPHECYAKVFDEFKPLVEEPQNLIKQNCELFEQLGEYKFQNALLVRYTKKVPQVSTPTLVEVSRNLGKVGSKCCKHPEAKRMPCAEDYLSVVLNQLCVLHEKTPVSDRVTKCCTESLVNRRPCFSALEVDETYVPKEFNAETFTFHADICTLSEKERQIKKQTALVELVKHKPKATKEQLKAVMDDFAAFVEKCCKADDKETCFAEEGKKLVAASQAALGLGGGGSGGGGSGGGGSGGGGSGGGGSGGGGSRPSGRKSSKMQAFRIWDVNQKTFYLRNNQLVAGYLQGPNVNLEEKIDVVPIEPHALFLGIHGGKMCLSCVKSGDETRLQLEAVNITDLSENRKQDKRFAFIRSDSGPTTSFESAACPGWFLCTAMEADQPVSLTNMPDEGVMVTKFYFQEDE

SEQ ID NO: 451 - protein, 496 aa, Artificial Sequence
  Description of Artificial Sequence: Synthetic fusion protein
  MOD_RES (1)..(1): tyrosine, N-acetyl tyrosine, pyroglutamyl-tyrosine, glucitol-tyrosine, D-histidine, alpha-2 methylimidazolyl acetic acid (DMIA), N-methylhistidine, alpha-methylhistidine, imidazole acetic acid, deamino-histidine, hydroxylhistidine,
  MOD_RES (1)..(1): acetylhistidine, homohistidine, N-palmitic acid-tyrosine, N-Fmoc-tyrosine, or absent
  MOD_RES (1)..(5): Xaa1 to T5 are repeated for 0 or 1 time
  MOD_RES (2)..(2): alanine, D-alanine, D-serine, serine, valine, glycine, N-methylserine, N-methylalanine, 2-methylalanine, or absent
  MOD_RES (3)..(3): glutamic acid, hydroxyl proline, proline, or absent
  MOD_RES (6)..(6): phenylalanine, or absent
  MOD_RES (31)..(42): G31 to Q42 are repeated for 0 or 1 time
  MOD_RES (43)..(51): P43 to S51 are repeated for 0 or 1 time
  MOD_RES (52)..(81): "GGGGS" is repeated for 0, 1, 2, 3, 4, 5 or 6 times
  MOD_RES (234)..(263): "GGGGS" is repeated for 0, 1, 2, 3, 4, 5 or 6 times
XXXGTXISDYSIAMDKIHQQDFVNWLLAQKGKKNDWKHNITQPSSGAPPPSGGGGSGGGGSGGGGSGGGGSGGGGSGGGGSRPSGRKSSKMQAFRIWDVNQKTFYLRNNQLVAGYLQGPNVNLEEKIDVVPIEPHALFLGIHGGKMCLSCVKSGDETRLQLEAVNITDLSENRKQDKRFAFIRSDSGPTTSFESAACPGWFLCTAMEADQPVSLTNMPDEGVMVTKFYFQEDEGGGGSGGGGSGGGGSGGGGSGGGGSGGGGSAEPKSCDKTHTCPPCPAPELLGGPSVFLFPPKPKDTLMISRTPEVTCVVVDVSHEDPEVKFNWYVDGVEVHNAKTKPREEQYNSTYRVVSVLTVLHQDWLNGKEYKCKVSNKALPAPIEKTISKAKGQPREPQVYTLPPSREEMTKNQVSLTCLVKGFYPSDIAVEWESNGQPENNYKTTPPVLDSDGSFFLYSKLTVDKSRWQQGNVFSCSVMHEALHNHYTQKSLSLSPGK

SEQ ID NO: 452 - protein, 496 aa, Artificial Sequence
  Description of Artificial Sequence: Synthetic fusion protein
  MOD_RES (1)..(1): tyrosine, N-acetyl tyrosine, pyroglutamyl-tyrosine, glucitol-tyrosine, D-histidine, alpha-2 methylimidazolyl acetic acid(DMIA), N-methylhistidine, alpha-methylhistidine, imidazole acetic acid, deamino-histidine, hydroxylhistidine,
  MOD_RES (1)..(1): acetylhistidine, homohistidine, N-palmitic acid-tyrosine, N-Fmoc-tyrosine, or absent
  MOD_RES (1)..(5): Xaa1 to T5 are repeated for 0 or 1 time
  MOD_RES (2)..(2): alanine, D-alanine, D-serine, serine, valine, glycine, N-methylserine, N-methylalanine, 2-methylalanine, or absent
  MOD_RES (3)..(3): glutamic acid, hydroxyl proline, proline, or absent
  MOD_RES (6)..(6): phenylalanine, or absent
  MOD_RES (31)..(42): G31 to Q42 are repeated for 0 or 1 time
  MOD_RES (43)..(51): P43 to S51 are repeated for 0 or 1 time
  MOD_RES (52)..(81): "GGGGS" is repeated for 0, 1, 2, 3, 4, 5 or 6 times
  MOD_RES (315)..(344): "GGGGS" is repeated for 0, 1, 2, 3, 4, 5 or 6 times
XXXGTXISDYSIAMDKIHQQDFVNWLLAQKGKKNDWKHNITQPSSGAPPPSGGGGSGGGGSGGGGSGGGGSGGGGSGGGGSAEPKSCDKTHTCPPCPAPELLGGPSVFLFPPKPKDTLMISRTPEVTCVVVDVSHEDPEVKFNWYVDGVEVHNAKTKPREEQYNSTYRVVSVLTVLHQDWLNGKEYKCKVSNKALPAPIEKTISKAKGQPREPQVYTLPPSREEMTKNQVSLTCLVKGFYPSDIAVEWESNGQPENNYKTTPPVLDSDGSFFLYSKLTVDKSRWQQGNVFSCSVMHEALHNHYTQKSLSLSPGKGGGGSGGGGSGGGGSGGGGSGGGGSGGGGSRPSGRKSSKMQAFRIWDVNQKTFYLRNNQLVAGYLQGPNVNLEEKIDVVPIEPHALFLGIHGGKMCLSCVKSGDETRLQLEAVNITDLSENRKQDKRFAFIRSDSGPTTSFESAACPGWFLCTAMEADQPVSLTNMPDEGVMVTKFYFQEDE

SEQ ID NO: 453 - protein, 492 aa, Artificial Sequence
  Description of Artificial Sequence: Synthetic fusion protein
  MOD_RES (1)..(1): tyrosine, N-acetyl tyrosine, pyroglutamyl-tyrosine, glucitol-tyrosine, D-histidine, alpha-2 methylimidazolyl acetic acid(DMIA), N-methylhistidine, alpha-methylhistidine, imidazole acetic acid, deamino-histidine, hydroxylhistidine,
  MOD_RES (1)..(1): acetylhistidine, homohistidine, N-palmitic acid-tyrosine, N-Fmoc-tyrosine, or absent
  MOD_RES (1)..(5): Xaa1 to T5 are repeated for 0 or 1 time
  MOD_RES (2)..(2): alanine, D-alanine, D-serine, serine, valine, glycine, N-methylserine, N-methylalanine, 2-methylalanine, or absent
  MOD_RES (3)..(3): glutamic acid, hydroxyl proline, proline, or absent
  MOD_RES (6)..(6): phenylalanine, or absent
  MOD_RES (31)..(42): G31 to Q42 are repeated for 0 or 1 time
  MOD_RES (43)..(51): P43 to S51 are repeated for 0 or 1 time
  MOD_RES (52)..(81): "GGGGS" is repeated for 0, 1, 2, 3, 4, 5 or 6 times
  MOD_RES (197)..(197): cysteine or serine
  MOD_RES (234)..(263): "GGGGS" is repeated for 0, 1, 2, 3, 4, 5 or 6 times
XXXGTXISDYSIAMDKIHQQDFVNWLLAQKGKKNDWKHNITQPSSGAPPPSGGGGSGGGGSGGGGSGGGGSGGGGSGGGGSRPSGRKSSKMQAFRIWDVNQKTFYLRNNQLVAGYLQGPNVNLEEKIDVVPIEPHALFLGIHGGKMCLSCVKSGDETRLQLEAVNITDLSENRKQDKRFAFIRSDSGPTTSFESAAXPGWFLCTAMEADQPVSLTNMPDEGVMVTKFYFQEDEGGGGSGGGGSGGGGSGGGGSGGGGSGGGGSAESKYGPPCPPCPAPEAAGGPSVFLFPPKPKDTLMISRTPEVTCVVVDVSQEDPEVQFNWYVDGVEVHNAKTKPREEQFNSTYRVVSVLTVLHQDWLNGKEYKCKVSNKGLPSSIEKTISKAKGQPREPQVYTLPPSQEEMTKNQVSLTCLVKGFYPSDIAVEWESNGQPENNYKTTPPVLDSDGSFFLYSRLTVDKSRWQEGNVFSCSVMHEALHNHYTQKSLSLSLG

SEQ ID NO: 454 - protein, 153 aa, Artificial Sequence; identical to SEQ ID NO: 268
  Description of Artificial Sequence: Synthetic fusion protein
  MOD_RES (1)..(1): methionine, cysteine, general formula 1, general formula 2 or absent
  MOD_RES (1)..(1): UL-
  MOD_RES (117)..(117): -linking group-GIP receptor binding polypeptide

SEQ ID NO: 455 - protein, 153 aa, Artificial Sequence; identical to SEQ ID NO: 269
  Description of Artificial Sequence: Synthetic fusion protein
  MOD_RES (1)..(1): methionine, cysteine, general formula 1, general formula 2 or absent
  MOD_RES (1)..(1): UL-
  MOD_RES (85)..(85): -linking group-GIP receptor binding polypeptide

SEQ ID NO: 456 - protein, 51 aa, Unknown
  Description of Unknown: GIP receptor binding polypeptide
  MOD_RES (1)..(1): tyrosine, N-acetyl tyrosine, pyroglutamyl-tyrosine, glucitol-tyrosine, D-histidine, alpha-2 methylimidazolyl acetic acid(DMIA), N-methylhistidine, alpha-methylhistidine, imidazole acetic acid, deamino-histidine, hydroxylhistidine,
  MOD_RES (1)..(1): acetylhistidine, homohistidine, N-palmitic acid-tyrosine, N-Fmoc-tyrosine, or absent
  MOD_RES (1)..(5): Xaa1 to T5 are repeated for 0 or 1 time
  MOD_RES (1)..(1): UL-
  MOD_RES (2)..(2): alanine, D-alanine, D-serine, serine, valine, glycine, N-methylserine, N-methylalanine, 2-methylalanine, or absent
  MOD_RES (3)..(3): glutamic acid, hydroxyl proline, proline, or absent
  MOD_RES (6)..(6): phenylalanine, or absent
  MOD_RES (10)..(10): tyrosine, tryptophan, phenylalanine, valine, lysine, ornithine, glutamic acid, leucine, general formula 1, or general formula 2
  MOD_RES (12)..(12): isoleucine, serine, lysine, arginine, general formula 1, or general formula 2
  MOD_RES (16)..(16): lysine, arginine, serine, glutamic acid, glutamine, homo-glutamic acid, homoecysteine, threonine, glycine, 2-methylalanine, general formula 1, or general formula 2
  MOD_RES (27)..(27): leucine, isoleucine, norleucine, lysine, valine, methionine, general formula 1, or general formula 2
  MOD_RES (28)..(28): glycine, alanine, lysine, asparagine, general formula 1, or general formula 2
  MOD_RES (30)..(30): lysine, arginine, glycine, general formula 1, or general formula 2
  MOD_RES (31)..(42): G31 to Q42 are repeated for 0 or 1 time
  MOD_RES (32)..(32): lysine, arginine, serine, general formula 1, general formula 2, or absent
  MOD_RES (33)..(33): lysine, arginine, serine, general formula 1, general formula 2, or absent
  MOD_RES (37)..(37): lysine, arginine, proline, general formula 1, general formula 2, or absent
  MOD_RES (43)..(51): P43 to S51 are repeated for 0 or 1 time
XXXGTXISDXSXAMDXIHQQDFVNWLXXQXGXXNDWXHNITQPSSGAPPPS

SEQ ID NO: 457 - protein, 43 aa, Unknown
  Description of Unknown: GIP receptor binding polypeptide
  MOD_RES (1)..(1): tyrosine, N-acetyl tyrosine, pyroglutamyl-tyrosine, glucitol-tyrosine, D-histidine, alpha-2 methylimidazolyl acetic acid(DMIA), N-methylhistidine, alpha-methylhistidine, imidazole acetic acid, deamino-histidine, hydroxylhistidine,
  MOD_RES (1)..(1): acetylhistidine, homohistidine, N-palmitic acid-tyrosine, N-Fmoc-tyrosine, or absent
  MOD_RES (2)..(2): alanine, D-alanine, D-serine, serine, valine, glycine, N-methylserine, N-methylalanine, 2-methylalanine, or absent
  MOD_RES (3)..(3): glutamic acid, hydroxyl proline, proline, or absent
XXXGTFISDYSIAMDKIHQQDFVNWLLAQKGKKNDWKHNITQC

SEQ ID NO: 458 - protein, 42 aa, Unknown
  Description of Unknown: GIP receptor binding polypeptide
  MOD_RES (1)..(1): tyrosine, N-acetyl tyrosine, pyroglutamyl-tyrosine, glucitol-tyrosine, D-histidine, alpha-2 methylimidazolyl acetic acid(DMIA), N-methylhistidine, alpha-methylhistidine, imidazole acetic acid, deamino-histidine, hydroxylhistidine,
  MOD_RES (1)..(1): acetylhistidine, homohistidine, N-palmitic acid-tyrosine, N-Fmoc-tyrosine, or absent
  MOD_RES (2)..(2): alanine, D-alanine, D-serine, serine, valine, glycine, N-methylserine, N-methylalanine, 2-methylalanine, or absent
  MOD_RES (3)..(3): glutamic acid, hydroxyl proline, proline, or absent
XXXGTFISDYSIAMDKIHQQDFVNWLLAQKGKKNDWCHNITQ

SEQ ID NO: 459 - protein, 42 aa, Unknown
  Description of Unknown: GIP receptor binding polypeptide
  MOD_RES (1)..(1): tyrosine, N-acetyl tyrosine, pyroglutamyl-tyrosine, glucitol-tyrosine, D-histidine, alpha-2 methylimidazolyl acetic acid(DMIA), N-methylhistidine, alpha-methylhistidine, imidazole acetic acid, deamino-histidine, hydroxylhistidine,
  MOD_RES (1)..(1): acetylhistidine, homohistidine, N-palmitic acid-tyrosine, N-Fmoc-tyrosine, or absent
  MOD_RES (2)..(2): alanine, D-alanine, D-serine, serine, valine, glycine, N-methylserine, N-methylalanine, 2-methylalanine, or absent
  MOD_RES (3)..(3): glutamic acid, hydroxyl proline, proline, or absent
XXXGTFISDYSIAMDKIHQQDFVNWLLAQKGKCNDWKHNITQ

SEQ ID NO: 460 - protein, 42 aa, Unknown
  Description of Unknown: GIP receptor binding polypeptide
  MOD_RES (1)..(1): tyrosine, N-acetyl tyrosine, pyroglutamyl-tyrosine, glucitol-tyrosine, D-histidine, alpha-2 methylimidazolyl acetic acid(DMIA), N-methylhistidine, alpha-methylhistidine, imidazole acetic acid, deamino-histidine, hydroxylhistidine,
  MOD_RES (1)..(1): acetylhistidine, homohistidine, N-palmitic acid-tyrosine, N-Fmoc-tyrosine, or absent
  MOD_RES (2)..(2): alanine, D-alanine, D-serine, serine, valine, glycine, N-methylserine, N-methylalanine, 2-methylalanine, or absent
  MOD_RES (3)..(3): glutamic acid, hydroxyl proline, proline, or absent
XXXGTFISDYSIAMDKIHQQDFVNWLLAQKGCKNDWKHNITQ

SEQ ID NO: 461 - protein, 42 aa, Unknown
  Description of Unknown: GIP receptor binding polypeptide
  MOD_RES (1)..(1): tyrosine, N-acetyl tyrosine, pyroglutamyl-tyrosine, glucitol-tyrosine, D-histidine, alpha-2 methylimidazolyl acetic acid(DMIA), N-methylhistidine, alpha-methylhistidine, imidazole acetic acid, deamino-histidine, hydroxylhistidine,
  MOD_RES (1)..(1): acetylhistidine, homohistidine, N-palmitic acid-tyrosine, N-Fmoc-tyrosine, or absent
  MOD_RES (2)..(2): alanine, D-alanine, D-serine, serine, valine, glycine, N-methylserine, N-methylalanine, 2-methylalanine, or absent
  MOD_RES (3)..(3): glutamic acid, hydroxyl proline, proline, or absent
XXXGTFISDYSIAMDKIHQQDFVNWLLAQCGKKNDWKHNITQ

SEQ ID NO: 462 - protein, 42 aa, Unknown
  Description of Unknown: GIP receptor binding polypeptide
  MOD_RES (1)..(1): tyrosine, N-acetyl tyrosine, pyroglutamyl-tyrosine, glucitol-tyrosine, D-histidine, alpha-2 methylimidazolyl acetic acid(DMIA), N-methylhistidine, alpha-methylhistidine, imidazole acetic acid, deamino-histidine, hydroxylhistidine,
  MOD_RES (1)..(1): acetylhistidine, homohistidine, N-palmitic acid-tyrosine, N-Fmoc-tyrosine, or absent
  MOD_RES (2)..(2): alanine, D-alanine, D-serine, serine, valine, glycine, N-methylserine, N-methylalanine, 2-methylalanine, or absent
  MOD_RES (3)..(3): glutamic acid, hydroxyl proline, proline, or absent
XXXGTFISDYSIAMDCIHQQDFVNWLLAQKGKKNDWKHNITQ

SEQ ID NO: 463 - protein, 42 aa, Unknown
  Description of Unknown: GIP receptor binding polypeptide
  MOD_RES (1)..(1): tyrosine, N-acetyl tyrosine, pyroglutamyl-tyrosine, glucitol-tyrosine, D-histidine, alpha-2 methylimidazolyl acetic acid(DMIA), N-methylhistidine, alpha-methylhistidine, imidazole acetic acid, deamino-histidine, hydroxylhistidine,
  MOD_RES (1)..(1): acetylhistidine, homohistidine, N-palmitic acid-tyrosine, N-Fmoc-tyrosine, or absent
  MOD_RES (2)..(2): alanine, D-alanine, D-serine, serine, valine, glycine, N-methylserine, N-methylalanine, 2-methylalanine, or absent
  MOD_RES (3)..(3): glutamic acid, hydroxyl proline, proline, or absent
XXXGTFISDYSCAMDKIHQQDFVNWLLAQKGKKNDWKHNITQ

SEQ ID NO: 464 - protein, 42 aa, Unknown
  Description of Unknown: GIP receptor binding polypeptide
  MOD_RES (1)..(1): tyrosine, N-acetyl tyrosine, pyroglutamyl-tyrosine, glucitol-tyrosine, D-histidine, alpha-2 methylimidazolyl acetic acid(DMIA), N-methylhistidine, alpha-methylhistidine, imidazole acetic acid, deamino-histidine, hydroxylhistidine,
  MOD_RES (1)..(1): acetylhistidine, homohistidine, N-palmitic acid-tyrosine, N-Fmoc-tyrosine, or absent
  MOD_RES (2)..(2): alanine, D-alanine, D-serine, serine, valine, glycine, N-methylserine, N-methylalanine, 2-methylalanine, or absent
  MOD_RES (3)..(3): glutamic acid, hydroxyl proline, proline, or absent
XXXGTFISDCSIAMDKIHQQDFVNWLLAQKGKKNDWKHNITQ

SEQ ID NO: 465 - protein, 31 aa, Unknown
  Description of Unknown: GIP receptor binding polypeptide
  MOD_RES (1)..(1): tyrosine, N-acetyl tyrosine, pyroglutamyl-tyrosine, glucitol-tyrosine, D-histidine, alpha-2 methylimidazolyl acetic acid(DMIA), N-methylhistidine, alpha-methylhistidine, imidazole acetic acid, deamino-histidine, hydroxylhistidine,
  MOD_RES (1)..(1): acetylhistidine, homohistidine, N-palmitic acid-tyrosine, N-Fmoc-tyrosine, or absent
  MOD_RES (2)..(2): alanine, D-alanine, D-serine, serine, valine, glycine, N-methylserine, N-methylalanine, 2-methylalanine, or absent
  MOD_RES (3)..(3): glutamic acid, hydroxyl proline, proline, or absent
XXXGTFISDYSIAMDKIHQQDFVNWLLAQKC

SEQ ID NO: 466 - protein, 30 aa, Unknown
  Description of Unknown: GIP receptor binding polypeptide
  MOD_RES (1)..(1): tyrosine, N-acetyl tyrosine, pyroglutamyl-tyrosine, glucitol-tyrosine, D-histidine, alpha-2 methylimidazolyl acetic acid(DMIA), N-methylhistidine, alpha-methylhistidine, imidazole acetic acid, deamino-histidine, hydroxylhistidine,
  MOD_RES (1)..(1): acetylhistidine, homohistidine, N-palmitic acid-tyrosine, N-Fmoc-tyrosine, or absent
  MOD_RES (2)..(2): alanine, D-alanine, D-serine, serine, valine, glycine, N-methylserine, N-methylalanine, 2-methylalanine, or absent
  MOD_RES (3)..(3): glutamic acid, hydroxyl proline, proline, or absent
  MOD_RES (30)..(30): -NH2
XXXGTFISDYSIAMDCIHQQDFVNWLLAQK

SEQ ID NO: 467 - protein, 40 aa, Unknown
  Description of Unknown: GIP receptor binding polypeptide
  MOD_RES (1)..(1): tyrosine, N-acetyl tyrosine, pyroglutamyl-tyrosine, glucitol-tyrosine, D-histidine, alpha-2 methylimidazolyl acetic acid(DMIA), N-methylhistidine, alpha-methylhistidine, imidazole acetic acid, deamino-histidine, hydroxylhistidine,
  MOD_RES (1)..(1): acetylhistidine, homohistidine, N-palmitic acid-tyrosine, N-Fmoc-tyrosine, or absent
  MOD_RES (2)..(2): alanine, D-alanine, D-serine, serine, valine, glycine, N-methylserine, N-methylalanine, 2-methylalanine, or absent
  MOD_RES (3)..(3): glutamic acid, hydroxyl proline, proline, or absent
XXXGTFISDYSIAMDKIHQQDFVNWLLAQKPSSGAPPPSC

SEQ ID NO: 468 - protein, 39 aa, Unknown
  Description of Unknown: GIP receptor binding polypeptide
  MOD_RES (1)..(1): tyrosine, N-acetyl tyrosine, pyroglutamyl-tyrosine, glucitol-tyrosine, D-histidine, alpha-2 methylimidazolyl acetic acid(DMIA), N-methylhistidine, alpha-methylhistidine, imidazole acetic acid, deamino-histidine, hydroxylhistidine,
  MOD_RES (1)..(1): acetylhistidine, homohistidine, N-palmitic acid-tyrosine, N-Fmoc-tyrosine, or absent
  MOD_RES (2)..(2): alanine, D-alanine, D-serine, serine, valine, glycine, N-methylserine, N-methylalanine, 2-methylalanine, or absent
  MOD_RES (3)..(3): glutamic acid, hydroxyl proline, proline, or absent
  MOD_RES (39)..(39): -NH2
XXXGTFISDYSIAMDKIHQQDFVNWLLAQKPSSGAPPPC

SEQ ID NO: 469 - protein, 39 aa, Unknown
  Description of Unknown: GIP receptor binding polypeptide
  MOD_RES (1)..(1): tyrosine, N-acetyl tyrosine, pyroglutamyl-tyrosine, glucitol-tyrosine, D-histidine, alpha-2 methylimidazolyl acetic acid(DMIA), N-methylhistidine, alpha-methylhistidine, imidazole acetic acid, deamino-histidine, hydroxylhistidine,
  MOD_RES (1)..(1): acetylhistidine, homohistidine, N-palmitic acid-tyrosine, N-Fmoc-tyrosine, or absent
  MOD_RES (2)..(2): alanine, D-alanine, D-serine, serine, valine, glycine, N-methylserine, N-methylalanine, 2-methylalanine, or absent
  MOD_RES (3)..(3): glutamic acid, hydroxyl proline, proline, or absent
  MOD_RES (39)..(39): -NH2
XXXGTFISDYSIAMDKIHQQDFVNWLLAQCPSSGAPPPS

SEQ ID NO: 470 - protein, 39 aa, Unknown
  Description of Unknown: GIP receptor binding polypeptide
  MOD_RES (1)..(1): tyrosine, N-acetyl tyrosine, pyroglutamyl-tyrosine, glucitol-tyrosine, D-histidine, alpha-2 methylimidazolyl acetic acid(DMIA), N-methylhistidine, alpha-methylhistidine, imidazole acetic acid, deamino-histidine, hydroxylhistidine,
  MOD_RES (1)..(1): acetylhistidine, homohistidine, N-palmitic acid-tyrosine, N-Fmoc-tyrosine, or absent
  MOD_RES (2)..(2): alanine, D-alanine, D-serine, serine, valine, glycine, N-methylserine, N-methylalanine, 2-methylalanine, or absent
  MOD_RES (3)..(3): glutamic acid, hydroxyl proline, proline, or absent
  MOD_RES (39)..(39): -NH2
XXXGTFISDYSIAMDCIHQQDFVNWLLAQKPSSGAPPPS

SEQ ID NO: 471 - protein, 39 aa, Unknown
  Description of Unknown: GIP receptor binding polypeptide
  MOD_RES (1)..(1): tyrosine, N-acetyl tyrosine, pyroglutamyl-tyrosine, glucitol-tyrosine, D-histidine, alpha-2 methylimidazolyl acetic acid(DMIA), N-methylhistidine, alpha-methylhistidine, imidazole acetic acid, deamino-histidine, hydroxylhistidine,
  MOD_RES (1)..(1): acetylhistidine, homohistidine, N-palmitic acid-tyrosine, N-Fmoc-tyrosine, or absent
  MOD_RES (2)..(2): alanine, D-alanine, D-serine, serine, valine, glycine, N-methylserine, N-methylalanine, 2-methylalanine, or absent
  MOD_RES (3)..(3): glutamic acid, hydroxyl proline, proline, or absent
  MOD_RES (39)..(39): -NH2
XXXGTFISDYSCAMDKIHQQDFVNWLLAQKPSSGAPPPS

SEQ ID NO: 472 - protein, 39 aa, Unknown
  Description of Unknown: GIP receptor binding polypeptide
  MOD_RES (1)..(1): tyrosine, N-acetyl tyrosine, pyroglutamyl-tyrosine, glucitol-tyrosine, D-histidine, alpha-2 methylimidazolyl acetic acid(DMIA), N-methylhistidine, alpha-methylhistidine, imidazole acetic acid, deamino-histidine, hydroxylhistidine,
  MOD_RES (1)..(1): acetylhistidine, homohistidine, N-palmitic acid-tyrosine, N-Fmoc-tyrosine, or absent
  MOD_RES (2)..(2): alanine, D-alanine, D-serine, serine, valine, glycine, N-methylserine, N-methylalanine, 2-methylalanine, or absent
  MOD_RES (3)..(3): glutamic acid, hydroxyl proline, proline, or absent
  MOD_RES (39)..(39): -NH2
XXXGTFISDCSIAMDKIHQQDFVNWLLAQKPSSGAPPPS

SEQ ID NO: 473 - protein, 26 aa, Unknown
  Description of Unknown: GIP receptor binding polypeptide
FISDYSIAMDKIHQQDFVNWLLAQKC

SEQ ID NO: 474 - protein, 25 aa, Unknown
  Description of Unknown: GIP receptor binding polypeptide
  MOD_RES (25)..(25): -NH2
FISDYSIAMDKIHQQDFVNWLLAQC

SEQ ID NO: 475 - protein, 25 aa, Unknown
  Description of Unknown: GIP receptor binding polypeptide
  MOD_RES (25)..(25): -NH2
FISDYSIAMDCIHQQDFVNWLLAQK

SEQ ID NO: 476 - protein, 24 aa, Unknown
  Description of Unknown: GIP receptor binding polypeptide
  MOD_RES (24)..(24): -NH2
ISDYSIAMDKIHQQDFVNWLLAQC

SEQ ID NO: 477 - protein, 24 aa, Unknown
  Description of Unknown: GIP receptor binding polypeptide
  MOD_RES (24)..(24): -NH2
ISDYSIAMDCIHQQDFVNWLLAQK

SEQ ID NO: 478 - protein, 43 aa, Unknown
  Description of Unknown: GIP receptor binding polypeptide
  MOD_RES (1)..(1): tyrosine, N-acetyl tyrosine, pyroglutamyl-tyrosine, glucitol-tyrosine, D-histidine, alpha-2 methylimidazolyl acetic acid(DMIA), N-methylhistidine, alpha-methylhistidine, imidazole acetic acid, deamino-histidine, hydroxylhistidine,
  MOD_RES (1)..(1): acetylhistidine, homohistidine, N-palmitic acid-tyrosine, N-Fmoc-tyrosine, or absent
  MOD_RES (2)..(2): alanine, D-alanine, D-serine, serine, valine, glycine, N-methylserine, N-methylalanine, 2-methylalanine, or absent
  MOD_RES (3)..(3): glutamic acid, hydroxyl proline, proline, or absent
XXXGTFISDYSIAMDRIHQQDFVNWLLAQRGRRNDWRHNITQK

SEQ ID NO: 479 - protein, 42 aa, Unknown
  Description of Unknown: GIP receptor binding polypeptide
  MOD_RES (1)..(1): tyrosine, N-acetyl tyrosine, pyroglutamyl-tyrosine, glucitol-tyrosine, D-histidine, alpha-2 methylimidazolyl acetic acid(DMIA), N-methylhistidine, alpha-methylhistidine, imidazole acetic acid, deamino-histidine, hydroxylhistidine,
  MOD_RES (1)..(1): acetylhistidine, homohistidine, N-palmitic acid-tyrosine, N-Fmoc-tyrosine, or absent
  MOD_RES (2)..(2): alanine, D-alanine, D-serine, serine, valine, glycine, N-methylserine, N-methylalanine, 2-methylalanine, or absen
  MOD_RES (3)..(3): glutamic acid, hydroxyl proline, proline, or absent
XXXGTFISDYSIAMDRIHQQDFVNWLLAQRGRRNDWKHNITQ

SEQ ID NO: 480 - protein, 42 aa, Unknown
  Description of Unknown: GIP receptor binding polypeptide
  MOD_RES (1)..(1): tyrosine, N-acetyl tyrosine, pyroglutamyl-tyrosine, glucitol-tyrosine, D-histidine, alpha-2 methylimidazolyl acetic acid(DMIA), N-methylhistidine, alpha-methylhistidine, imidazole acetic acid, deamino-histidine, hydroxylhistidine,
  MOD_RES (1)..(1): acetylhistidine, homohistidine, N-palmitic acid-tyrosine, N-Fmoc-tyrosine, or absent
  MOD_RES (2)..(2): alanine, D-alanine, D-serine, serine, valine, glycine, N-methylserine, N-methylalanine, 2-methylalanine, or absent
  MOD_RES (3)..(3): glutamic acid, hydroxyl proline, proline, or absent
XXXGTFISDYSIAMDRIHQQDFVNWLLAQRGRKNDWRHNITQ

SEQ ID NO: 481 - protein, 42 aa, Unknown
  Description of Unknown: GIP receptor binding polypeptide
  MOD_RES (1)..(1): tyrosine, N-acetyl tyrosine, pyroglutamyl-tyrosine, glucitol-tyrosine, D-histidine, alpha-2 methylimidazolyl acetic acid(DMIA), N-methylhistidine, alpha-methylhistidine, imidazole acetic acid, deamino-histidine, hydroxylhistidine,
  MOD_RES (1)..(1): acetylhistidine, homohistidine, N-palmitic acid-tyrosine, N-Fmoc-tyrosine, or absent
  MOD_RES (2)..(2): alanine, D-alanine, D-serine, serine, valine, glycine, N-methylserine, N-methylalanine, 2-methylalanine, or absent
  MOD_RES (3)..(3): glutamic acid, hydroxyl proline, proline, or absent
XXXGTFISDYSIAMDRIHQQDFVNWLLAQRGKRNDWRHNITQ

SEQ ID NO: 482 - protein, 42 aa, Unknown
  Description of Unknown: GIP receptor binding polypeptide
  MOD_RES (1)..(1): tyrosine, N-acetyl tyrosine, pyroglutamyl-tyrosine, glucitol-tyrosine, D-histidine, alpha-2 methylimidazolyl acetic acid(DMIA), N-methylhistidine, alpha-methylhistidine, imidazole acetic acid, deamino-histidine, hydroxylhistidine,
  MOD_RES (1)..(1): acetylhistidine, homohistidine, N-palmitic acid-tyrosine, N-Fmoc-tyrosine, or absent
  MOD_RES (2)..(2): alanine, D-alanine, D-serine, serine, valine, glycine, N-methylserine, N-methylalanine, 2-methylalanine, or absent
  MOD_RES (3)..(3): glutamic acid, hydroxyl proline, proline, or absent
XXXGTFISDYSIAMDRIHQQDFVNWLLAQKGRRNDWRHNITQ

SEQ ID NO: 483 - protein, 42 aa, Unknown
  Description of Unknown: GIP receptor binding polypeptide
  MOD_RES (1)..(1): tyrosine, N-acetyl tyrosine, pyroglutamyl-tyrosine, glucitol-tyrosine, D-histidine, alpha-2 methylimidazolyl acetic acid(DMIA), N-methylhistidine, alpha-methylhistidine, imidazole acetic acid, deamino-histidine, hydroxylhistidine,
  MOD_RES (1)..(1): acetylhistidine, homohistidine, N-palmitic acid-tyrosine, N-Fmoc-tyrosine, or absent
  MOD_RES (2)..(2): alanine, D-alanine, D-serine, serine, valine, glycine, N-methylserine, N-methylalanine, 2-methylalanine, or absent
  MOD_RES (3)..(3): glutamic acid, hydroxyl proline, proline, or absent
XXXGTFISDYSIAMDKIHQQDFVNWLLAQRGRRNDWRHNITQ

SEQ ID NO: 484 - protein, 42 aa, Unknown
  Description of Unknown: GIP receptor binding polypeptide
  MOD_RES (1)..(1): tyrosine, N-acetyl tyrosine, pyroglutamyl-tyrosine, glucitol-tyrosine, D-histidine, alpha-2 methylimidazolyl acetic acid(DMIA), N-methylhistidine, alpha-methylhistidine, imidazole acetic acid, deamino-histidine, hydroxylhistidine,
  MOD_RES (1)..(1): acetylhistidine, homohistidine, N-palmitic acid-tyrosine, N-Fmoc-tyrosine, or absent
  MOD_RES (2)..(2): alanine, D-alanine, D-serine, serine, valine, glycine, N-methylserine, N-methylalanine, 2-methylalanine, or absent
  MOD_RES (3)..(3): glutamic acid, hydroxyl proline, proline, or absent
XXXGTFISDYSKAMDRIHQQDFVNWLLAQRGRRNDWRHNITQ

SEQ ID NO: 485 - protein, 42 aa, Unknown
  Description of Unknown: GIP receptor binding polypeptide
  MOD_RES (1)..(1): tyrosine, N-acetyl tyrosine, pyroglutamyl-tyrosine, glucitol-tyrosine, D-histidine, alpha-2 methylimidazolyl acetic acid(DMIA), N-methylhistidine, alpha-methylhistidine, imidazole acetic acid, deamino-histidine, hydroxylhistidine,
  MOD_RES (1)..(1): acetylhistidine, homohistidine, N-palmitic acid-tyrosine, N-Fmoc-tyrosine, or absent
  MOD_RES (2)..(2): alanine, D-alanine, D-serine, serine, valine, glycine, N-methylserine, N-methylalanine, 2-methylalanine, or absent
  MOD_RES (3)..(3): glutamic acid, hydroxyl proline, proline, or absent
XXXGTFISDKSIAMDRIHQQDFVNWLLAQRGRRNDWRHNITQ

SEQ ID NO: 486 - protein, 40 aa, Unknown
  Description of Unknown: GIP receptor binding polypeptide
  MOD_RES (1)..(1): tyrosine, N-acetyl tyrosine, pyroglutamyl-tyrosine, glucitol-tyrosine, D-histidine, alpha-2 methylimidazolyl acetic acid(DMIA), N-methylhistidine, alpha-methylhistidine, imidazole acetic acid, deamino-histidine, hydroxylhistidine,
  MOD_RES (1)..(1): acetylhistidine, homohistidine, N-palmitic acid-tyrosine, N-Fmoc-tyrosine, or absent
  MOD_RES (2)..(2): alanine, D-alanine, D-serine, serine, valine, glycine, N-methylserine, N-methylalanine, 2-methylalanine, or absen
  MOD_RES (3)..(3): glutamic acid, hydroxyl proline, proline, or absent
XXXGTFISDYSIAMDRIHQQDFVNWLLAQRPSSGAPPPSK

SEQ ID NO: 487 - protein, 39 aa, Unknown
  Description of Unknown: GIP receptor binding polypeptide
  MOD_RES (1)..(1): tyrosine, N-acetyl tyrosine, pyroglutamyl-tyrosine, glucitol-tyrosine, D-histidine, alpha-2 methylimidazolyl acetic acid(DMIA), N-methylhistidine, alpha-methylhistidine, imidazole acetic acid, deamino-histidine, hydroxylhistidine,
  MOD_RES (1)..(1): acetylhistidine, homohistidine, N-palmitic acid-tyrosine, N-Fmoc-tyrosine, or absent
  MOD_RES (2)..(2): alanine, D-alanine, D-serine, serine, valine, glycine, N-methylserine, N-methylalanine, 2-methylalanine, or absent
  MOD_RES (3)..(3): glutamic acid, hydroxyl proline, proline, or absent
  MOD_RES (39)..(39): -NH2
XXXGTFISDYSIAMDRIHQQDFVNWLLAQRPSSGAPPPK

SEQ ID NO: 488 - protein, 39 aa, Unknown
  Description of Unknown: GIP receptor binding polypeptide
  MOD_RES (1)..(1): tyrosine, N-acetyl tyrosine, pyroglutamyl-tyrosine, glucitol-tyrosine, D-histidine, alpha-2 methylimidazolyl acetic acid(DMIA), N-methylhistidine, alpha-methylhistidine, imidazole acetic acid, deamino-histidine, hydroxylhistidine,
  MOD_RES (1)..(1): acetylhistidine, homohistidine, N-palmitic acid-tyrosine, N-Fmoc-tyrosine, or absent
  MOD_RES (2)..(2): alanine, D-alanine, D-serine, serine, valine, glycine, N-methylserine, N-methylalanine, 2-methylalanine, or absent
  MOD_RES (3)..(3): glutamic acid, hydroxyl proline, proline, or absent
  MOD_RES (39)..(39): -NH2
XXXGTFISDYSIAMDRIHQQDFVNWLLAQKPSSGAPPPS

SEQ ID NO: 489 - protein, 39 aa, Unknown
  Description of Unknown: GIP receptor binding polypeptide
  MOD_RES (1)..(1): tyrosine, N-acetyl tyrosine, pyroglutamyl-tyrosine, glucitol-tyrosine, D-histidine, alpha-2 methylimidazolyl acetic acid(DMIA), N-methylhistidine, alpha-methylhistidine, imidazole acetic acid, deamino-histidine, hydroxylhistidine,
  MOD_RES (1)..(1): acetylhistidine, homohistidine, N-palmitic acid-tyrosine, N-Fmoc-tyrosine, or absent
  MOD_RES (2)..(2): alanine, D-alanine, D-serine, serine, valine, glycine, N-methylserine, N-methylalanine, 2-methylalanine, or absent
  MOD_RES (3)..(3): glutamic acid, hydroxyl proline, proline, or absent
  MOD_RES (39)..(39): -NH2
XXXGTFISDYSIAMDKIHQQDFVNWLLAQRPSSGAPPPS

SEQ ID NO: 490 - protein, 39 aa, Unknown
  Description of Unknown: GIP receptor binding polypeptide
  MOD_RES (1)..(1): tyrosine, N-acetyl tyrosine, pyroglutamyl-tyrosine, glucitol-tyrosine, D-histidine, alpha-2 methylimidazolyl acetic acid(DMIA), N-methylhistidine, alpha-methylhistidine, imidazole acetic acid, deamino-histidine, hydroxylhistidine,
  MOD_RES (1)..(1): acetylhistidine, homohistidine, N-palmitic acid-tyrosine, N-Fmoc-tyrosine, or absent
  MOD_RES (2)..(2): alanine, D-alanine, D-serine, serine, valine, glycine, N-methylserine, N-methylalanine, 2-methylalanine, or absent
  MOD_RES (3)..(3): glutamic acid, hydroxyl proline, proline, or absent
  MOD_RES (39)..(39): -NH2
XXXGTFISDKSIAMDRIHQQDFVNWLLAQRPSSGAPPPS

SEQ ID NO: 491 - protein, 30 aa, Unknown
  Description of Unknown: GIP receptor binding polypeptide
  MOD_RES (1)..(1): tyrosine, N-acetyl tyrosine, pyroglutamyl-tyrosine, glucitol-tyrosine, D-histidine, alpha-2 methylimidazolyl acetic acid(DMIA), N-methylhistidine, alpha-methylhistidine, imidazole acetic acid, deamino-histidine, hydroxylhistidine,
  MOD_RES (1)..(1): acetylhistidine, homohistidine, N-palmitic acid-tyrosine, N-Fmoc-tyrosine, or absent
  MOD_RES (2)..(2): alanine, D-alanine, D-serine, serine, valine, glycine, N-methylserine, N-methylalanine, 2-methylalanine, or absent
  MOD_RES (3)..(3): glutamic acid, hydroxyl proline, proline, or absent
  MOD_RES (30)..(30): -NH2
XXXGTFISDYSIAMDRIHQQDFVNWLLAQK

SEQ ID NO: 492 - protein, 30 aa, Unknown
  Description of Unknown: GIP receptor binding polypeptide
  MOD_RES (1)..(1): tyrosine, N-acetyl tyrosine, pyroglutamyl-tyrosine, glucitol-tyrosine, D-histidine, alpha-2 methylimidazolyl acetic acid(DMIA), N-methylhistidine, alpha-methylhistidine, imidazole acetic acid, deamino-histidine, hydroxylhistidine,
  MOD_RES (1)..(1): acetylhistidine, homohistidine, N-palmitic acid-tyrosine, N-Fmoc-tyrosine, or absent
  MOD_RES (2)..(2): alanine, D-alanine, D-serine, serine, valine, glycine, N-methylserine, N-methylalanine, 2-methylalanine, or absent
  MOD_RES (3)..(3): glutamic acid, hydroxyl proline, proline, or absent
  MOD_RES (30)..(30): -NH2
XXXGTFISDYSIAMDKIHQQDFVNWLLAQR

SEQ ID NO: 493 - protein, 25 aa, Unknown
  Description of Unknown: GIP receptor binding polypeptide
  MOD_RES (25)..(25): -NH2
FISDYSIAMDRIHQQDFVNWLLAQK

SEQ ID NO: 494 - protein, 25 aa, Unknown
  Description of Unknown: GIP receptor binding polypeptide
  MOD_RES (25)..(25): -NH2
FISDYSIAMDKIHQQDFVNWLLAQR

SEQ ID NO: 495 - protein, 24 aa, Unknown
  Description of Unknown: GIP receptor binding polypeptide
  MOD_RES (24)..(24): -NH2
ISDYSIAMDRIHQQDFVNWLLAQK

SEQ ID NO: 496 - protein, 24 aa, Unknown
  Description of Unknown: GIP receptor binding polypeptide
  MOD_RES (24)..(24): -NH2
ISDYSIAMDKIHQQDFVNWLLAQR

SEQ ID NO: 497 - protein, 154 aa, Artificial Sequence
  Description of Artificial Sequence: Synthetic fusion protein
  MOD_RES (1)..(1): cysteine or absent
  MOD_RES (1)..(1): GIP-1 receptor binding polypeptide - linking group-
  MOD_RES (2)..(2): methionine, cysteine, general formula 1, general formula 2 or absent
  MOD_RES (86)..(86): cysteine or asparagine
  MOD_RES (118)..(118): cysteine or serine
XXRPSGRKSSKMQAFRIWDVNQKTFYLRNNQLVAGYLQGPNVNLEEKIDVVPIEPHALFLGIHGGKMCLSCVKSGDETRLQLEAVXITDLSENRKQDKRFAFIRSDSGPTTSFESAAXPGWFLCTAMEADQPVSLTNMPDEGVMVTKFYFQEDE

SEQ ID NO: 498 - protein, 154 aa, Artificial Sequence
  Description of Artificial Sequence: Synthetic fusion protein
  MOD_RES (1)..(1): methionine, cysteine, general formula 1, general formula 2 or absent
  MOD_RES (1)..(1): UL-
  MOD_RES (85)..(85): cysteine or asparagine
  MOD_RES (117)..(117): cysteine or serine
  MOD_RES (153)..(153): cysteine or absent
  MOD_RES (153)..(153): -linking group - GIP receptor binding polypeptide
  MOD_RES (154)..(154): Xaa can be any naturally occurring amino acid
XRPSGRKSSKMQAFRIWDVNQKTFYLRNNQLVAGYLQGPNVNLEEKIDVVPIEPHALFLGIHGGKMCLSCVKSGDETRLQLEAVXITDLSENRKQDKRFAFIRSDSGPTTSFESAAXPGWFLCTAMEADQPVSLTNMPDEGVMVTKFYFQEDEX

SEQ ID NO: 499 - protein, 848 aa, Artificial Sequence
  Description of Artificial Sequence: Synthetic fusion protein
  MOD_RES (586)..(615): "GGGGS" is repeated for 0, 1, 2, 3, 4, 5 or 6 times
  MOD_RES (681)..(681): cysteine or serine
  MOD_RES (684)..(684): cysteine or serine
  MOD_RES (731)..(731): cysteine or serine
  MOD_RES (737)..(737): cysteine or serine
  MOD_RES (768)..(797): "GGGGS" is repeated for 0, 1, 2, 3, 4, 5 or 6 times
  MOD_RES (827)..(828): T827 and G828 are linked by CL
DAHKSEVAHRFKDLGEENFKALVLIAFAQYLQQCPFEDHVKLVNEVTEFAKTCVADESAENCDKSLHTLFGDKLCTVATLRETYGEMADCCAKQEPERNECFLQHKDDNPNLPRLVRPEVDVMCTAFHDNEETFLKKYLYEIARRHPYFYAPELLFFAKRYKAAFTECCQAADKAACLLPKLDELRDEGKASSAKQRLKCASLQKFGERAFKAWAVARLSQRFPKAEFAEVSKLVTDLTKVHTECCHGDLLECADDRADLAKYICENQDSISSKLKECCEKPLLEKSHCIAEVENDEMPADLPSLAADFVESKDVCKNYAEAKDVFLGMFLYEYARRHPDYSVVLLLRLAKTYETTLEKCCAAADPHECYAKVFDEFKPLVEEPQNLIKQNCELFEQLGEYKFQNALLVRYTKKVPQVSTPTLVEVSRNLGKVGSKCCKHPEAKRMPCAEDYLSVVLNQLCVLHEKTPVSDRVTKCCTESLVNRRPCFSALEVDETYVPKEFNAETFTFHADICTLSEKERQIKKQTALVELVKHKPKATKEQLKAVMDDFAAFVEKCCKADDKETCFAEEGKKLVAASQAALGLGGGGSGGGGSGGGGSGGGGSGGGGSGGGGSRPSGRKSSKMQAFRIWDVNQKTFYLRNNQLVAGYLQGPNVNLEEKIDVVPIEPHALFLGIHGGKMXLSXVKSGDETRLQLEAVNITDLSENRKQDKRFAFIRSDSGPTTSFESAAXPGWFLXTAMEADQPVSLTNMPDEGVMVTKFYFQEDEGGGGSGGGGSGGGGSGGGGSGGGGSGGGGSFVNQHLCGSHLVEALYLVCGERGFFYTPKTGIVEQCCTSICSLYQLENYCN

SEQ ID NO: 500 - DNA, 534 bp, Homo sapiens
atggaaatctgcagaggcctccgcagtcacctaatcactctcctcctcttcctgttccattcagagacgatctgccgaccctctgggagaaaatccagcaagatgcaagccttcagaatctgggatgttaaccagaagaccttctatctgaggaacaaccaactagttgctggatacttgcaaggaccaaatgtcaatttagaagaaaagatagatgtggtacccattgagcctcatgctctgttcttgggaatccatggagggaagatgtgcctgtcctgtgtcaagtctggtgatgagaccagactccagctggaggcagttaacatcactgacctgagcgagaacagaaagcaggacaagcgcttcgccttcatccgctcagacagtggccccaccaccagttttgagtctgccgcctgccccggttggttcctctgcacagcgatggaagctgaccagcccgtcagcctcaccaatatgcctgacgaaggcgtcatggtcaccaaattctacttccaggaggacgagtag

SEQ ID NO: 501 - protein, 177 aa, Homo sapiens
MEICRGLRSHLITLLLFLFHSETICRPSGRKSSKMQAFRIWDVNQKTFYLRNNQLVAGYLQGPNVNLEEKIDVVPIEPHALFLGIHGGKMCLSCVKSGDETRLQLEAVNITDLSENRKQDKRFAFIRSDSGPTTSFESAACPGWFLCTAMEADQPVSLTNMPDEGVMVTKFYFQEDE

SEQ ID NO: 502 - DNA, 29 bp, Artificial Sequence
  Description of Artificial Sequence: Synthetic forward primer of IL-1ra
ggcggtctctaggtatggaaatctgcaga

SEQ ID NO: 503 - DNA, 29 bp, Artificial Sequence
  Description of Artificial Sequence: Synthetic forward primer of IL-1ra
ggcggtctctaggtcgaccctctgggaga

SEQ ID NO: 504 - DNA, 27 bp, Artificial Sequence
  Description of Artificial Sequence: Synthetic reverse primer of IL-1ra
ggcggatccttactactcgtcctcctg

SEQ ID NO: 505 - DNA, 677 bp, Artificial Sequence
  Description of Artificial Sequence: Synthetic cDNA of fusion polypeptide of insulin receptor binding polypeptde-linking group-IL-1Ra
tttgtcaatcagcacctttgtggttctcacctggtggaggctctgtacctggtgtgtggggaacgtggtttcttctacacacccaagaccggctcgggctcgtcgtcggctgctgctccccagaccggcattgtggagcagtgctgcaccagcatctgctccctctaccaactggagaactactgcaacggcggcggcggctcgggcggcggcggctcgcgaccctctgggagaaaatccagcaagatgcaagccttcagaatctgggatgttaaccagaagaccttctatctgaggaacaaccaactagttgctggatacttgcaaggaccaaatgtcaatttagaagaaaagatagatgtggtacccattgagcctcatgctctgttcttgggaatccatggagggaagatgtgcctgtcctgtgtcaagtctggtgatgagaccagactccagctggaggcagttaacatcactgacctgagcgagaacagaaagcaggacaagcgcttcgccttcatccgctcagacagtggccccaccaccagttttgagtctgccgcctgccccggttggttcctctgcacagcgatggaagctgaccagcccgtcagcctcaccaatatgcctgacgaaggcgtcatggtcaccaaattcacttccaggaggacgagtag

SEQ ID NO: 506 - DNA, 606 bp, Artificial Sequence
  Description of Artificial Sequence: Synthetic cDNA of fusion protein of Exendin-4-linking group-IL-1Ra
catggtgaaggaacatttaccagtgacttgtcaaaacagatggaagaggaggcagtgcggttatttattgagtggcttaagaacggaggaccaagtagcggggcacctccgccatcgggcggcggcggctcgggcggcggcggctcgcgaccctctgggagaaaatccagcaagatgcaagccttcagaatctgggatgttaaccagaagaccttctatctgaggaacaaccaactagttgctggatacttgcaaggaccaaatgtcaatttagaagaaaagatagatgtggtacccattgagcctcatgctctgttcttgggaatccatggagggaagatgtgcctgtcctgtgtcaagtctggtgatgagaccagactccagctggaggcagttaacatcactgacctgagcgagaacagaaagcaggacaagcgcttcgccttcatccgctcagacagtggccccaccaccagttttgagtctgccgcctgccccggttggttcctctgcacagcgatggaagctgaccagcccgtcagcctcaccaatatgcctgacgaaggcgtcatggtcaccaaattctacttccaggaggacgagtag

SEQ ID NO: 507 - DNA, 579 bp, Artificial Sequence
  Description of Artificial Sequence: Synthetic cDNA of fusion protein of GLP-1 receptor binding polypeptide -linking group-IL-1Ra
catggtgaaggaacatttaccagtgacgtgtcgtcgtacctcgaggagcaggctgctaaggagtttattgcttggctcgtgaagggccgaggcggcggcggctcgggcggcggcggctcgcgaccctctgggagaaaatccagcaagatgcaagccttcagaatctgggatgttaaccagaagaccttctatctgaggaacaaccaactagttgctggatacttgcaaggaccaaatgtcaatttagaagaaaagatagatgtggtacccattgagcctcatgctctgttcttgggaatccatggagggaagatgtgcctgtcctgtgtcaagtctggtgatgagaccagactccagctggaggcagttaacatcactgacctgagcgagaacagaaagcaggacaagcgcttcgccttcatccgctcagacagtggccccaccaccagttttgagtctgccgcctgccccggttggttcctctgcacagcgatggaagctgaccagcccgtcagcctcaccaatatgcctgacgaaggcgtcatggtcaccaaattctacttccaggaggacgagtag

SEQ ID NO: 508 - DNA, 33 bp, Artificial Sequence
  Description of Artificial Sequence: Synthetic forward primer of GLP-1
ggcggtctctaggtcatggtgaaggaacattta

SEQ ID NO: 509 - DNA, 58 bp, Artificial Sequence
  Description of Artificial Sequence: Synthetic reverse primer of GLP-1
cagagggtcgcgagccgccgccgcccgagccgccgccgcctcggcccttcacgagcca

SEQ ID NO: 510 - DNA, 54 bp, Artificial Sequence
  Description of Artificial Sequence: Synthetic forward primer of IL-1Ra
ggccgaggcggcggcggctcgggcggcggcggctcgcgaccctctgggagaaaa

SEQ ID NO: 511 - DNA, 37 bp, Artificial Sequence
  Description of Artificial Sequence: Synthetic reverse primer of IL-1Ra
ggcggatccctactcgtcctcctggaagtagaatttg

SEQ ID NO: 512 - DNA, 1758 bp, Homo sapiens
gatgcacacaagagtgaggttgctcatcggtttaaagatttgggagaagaaaatttcaaagccttggtgttgattgcctttgctcagtatcttcagcagtgtccatttgaagatcatgtaaaattagtgaatgaagtaactgaatttgcaaaaacatgtgttgctgatgagtcagctgaaaattgtgacaaatcacttcataccctttttggagacaaattatgcacagttgcaactcttcgtgaaacctatggtgaaatggctgactgctgtgcaaaacaagaacctgagagaaatgaatgcttcttgcaacacaaagatgacaacccaaacctcccccgattggtgagaccagaggttgatgtgatgtgcactgcttttcatgacaatgaagagacatttttgaaaaaatacttatatgaaattgccagaagacatccttacttttatgccccggaactccttttctttgctaaaaggtataaagctgcttttacagaatgttgccaagctgctgataaagctgcctgcctgttgccaaagctcgatgaacttcgggatgaagggaaggcttcgtctgccaaacagagactcaagtgtgccagtctccaaaaatttggagaaagagctttcaaagcatgggcagtagctcgcctgagccagagatttcccaaagctgagtttgcagaagtttccaagttagtgacagatcttaccaaagtccacacggaatgctgccatggagatctgcttgaatgtgctgatgacagggcggaccttgccaagtatatctgtgaaaatcaagattcgatctccagtaaactgaaggaatgctgtgaaaaacctctgttggaaaaatcccactgcattgccgaagtggaaaatgatgagatgcctgctgacttgccttcattagctgctgattttgttgaaagtaaggatgtttgcaaaaactatgctgaggcaaaggatgtcttcctgggcatgtttttgtatgaatatgcaagaaggcatcctgattactctgtcgtgctgctgctgagacttgccaagacatatgaaaccactctagagaagtgctgtgccgctgcagatcctcatgaatgctatgccaaagtgttcgatgaatttaaacctcttgtggaagagcctcagaatttaatcaaacaaaattgtgagctttttgagcagcttggagagtacaaattccagaatgcgctattagttcgttacaccaagaaagtaccccaagtgtcaactccaactcttgtagaggtctcaagaaacctaggaaaagtgggcagcaaatgttgtaaacatcctgaagcaaaaagaatgccctgtgcagaagactatctatccgtggtcctgaaccagttatgtgtgttgcatgagaaaacgccagtaagtgacagagtcaccaaatgctgcacagaatccttggtgaacaggcgaccatgcttttcagctctggaagtcgatgaaacatacgttcccaaagagtttaatgctgaaacgttcaccttccatgcagatatatgcacactttctgagaaggagagacaaatcaagaaacaaactgcacttgttgagcttgtgaaacacaagcccaaggcaacaaaagagcaactgaaagctgttatggatgatttcgcagcttttgtagagaagtgctgcaaggctgacgataaggagacctgctttgccgaggagggtaaaaaacttgttgctgcaagtcaagctgccttaggcttataa

SEQ ID NO: 513 - protein, 585 aa, Homo sapiens [sequence omitted]

SEQ ID NO: 514 - DNA, 615 bp, Artificial Sequence
  Description of Artificial Sequence: Synthetic cDNA of fusion protein of GIP-linking group-IL-1Ra
tacgcggaagggactttcatcagtgactacagtattgccatggacaagattcaccaacaagactttgtgaactggctgctggcccaaaaggggaagaagaatgactggaaacacaacatcacccagggcggcggcggctcgggcggcggcggctcgcgaccctctgggagaaaatccagcaagatgcaagccttcagaatctgggatgttaaccagaagaccttctatctgaggaacaaccaactagttgctggatacttgcaaggaccaaatgtcaatttagaagaaaagatagatgtggtacccattgagcctcatgctctgttcttgggaatccatggagggaagatgtgcctgtcctgtgtcaagtctggtgatgagaccagactccagctggaggcagttaacatcactgacctgagcgagaacagaaagcaggacaagcgcttcgccttcatccgctcagacagtggccccaccaccagttttgagtctgccgcctgccccggttggttcctctgcacagcgatggaagctgaccagcccgtcagcctcaccaatatgcctgacgaaggcgtcatggtcaccaaattctacttccaggaggacgagtag
